(19) United States
(12) Patent Application Publication
(10) Pub. No.: US 2006/0134653 A1
(43) Pub. Date: Jun. 22, 2006

(54) Differential expression of genes in microsatellite instability

(75) Inventors: Christopher Burgess, Westwood, MA (US); Theodore J. Catino, Attleboro, MA (US); Gary Molino, Norfolk, MA (US); Susan Myerow, Lexington, MA (US); Arunthathi Thiagalingam, Lexington, MA (US); Marcia Lewis, Cohasset, MA (US); Stephen Thibodeau, Rochester, MN (US); Lisa Allyn Boardman, Rochester, MN (US); Lawrence Burgart, Rochester, MN (US)

Correspondence Address: SONNENSCHEIN NATH & ROSENTHAL LLP;FOR PAULA EVANS, P.O. BOX 061080, WACKER DRIVE STATION, SEARS TOWER, CHICAGO, IL, 60606-1080, US

(73) Assignees: Bayer HealthCare LLC; Mayo Foundation for Medical Education and Research

(21) Appl. No.: 11/105,233

(22) Filed: Apr. 13, 2005

Related U.S. Application Data
(60) Provisional application No. 60/591,969, filed on Jul. 28, 2004.

(51) Int. Cl. C12Q 1/68

(52) U.S. Cl. 435/6

(57) ABSTRACT

The present invention relates to nucleic acid sequences which are overexpressed in colorectal tumors which display a high level of microsatellite instability (MSI-H) vs. tumors displaying a low level of microsatellite instability (MSS), and can thus be used to identify MSI-H in a patient, and be used further to facilitate patient prognosis, monitor disease progression/regression, identify appropriate treatment regimes, and evaluate the efficacy of treatment.

### RELATED APPLICATIONS

[0001] This application claims priority under 35 U.S.C. § 119(e) to U.S. Provisional Application Ser. No. 60/591,969 which was filed on Jul. 28, 2004, the entirety of which is incorporated herein by reference.

### BACKGROUND OF THE INVENTION

[0002] Colorectal carcinoma is a malignant neoplastic disease. There is a high incidence of colorectal carcinoma in the Western world, particularly in the United States. Tumors of this type often metastasize through lymphatic and vascular channels. Many patients with colorectal carcinoma eventually die from this disease. In fact, it is estimated that 62,000 persons in the United States alone die of colorectal carcinoma annually.

[0003] However, if diagnosed early, colorectal cancer may be treated effectively by surgical removal of the cancerous tissue. Colorectal cancers originate in the colorectal epithelium and typically are not extensively vascularized (and therefore not invasive) during the early stages of development. Colorectal cancer is thought to result from the clonal expansion of a single mutant cell in the epithelial lining of the colon or rectum. The transition to a highly vascularized, invasive and ultimately metastatic cancer which spreads throughout the body commonly takes ten years or longer. If the cancer is detected prior to invasion, surgical removal of the cancerous tissue is an effective cure. However, colorectal cancer is often detected only upon manifestation of clinical symptoms, such as pain and black tarry stool. Generally, such symptoms are present only when the disease is well established, often after metastasis has occurred, and the prognosis for the patient is poor, even after surgical resection of the cancerous tissue. Early detection of colorectal cancer therefore is important in that detection may significantly reduce its morbidity.

[0004] Invasive diagnostic methods such as endoscopic examination allow for direct visual identification, removal, and biopsy of potentially cancerous growths such as polyps. Endoscopy is expensive, uncomfortable, inherently risky, and therefore not a practical tool for screening populations to identify those with colorectal cancer. Non-invasive analysis of stool samples for characteristics indicative of the presence of colorectal cancer or precancer is a preferred alternative for early diagnosis, but no known diagnostic method is available which reliably achieves this goal.

### SUMMARY OF THE INVENTION

[0005] The present invention relates to nucleic acid sequences which are overexpressed in colorectal tumors which display a high level of microsatellite instability (MSI-H) vs. tumors displaying a low level of microsatellite instability (MSS), and can thus be used to identify MSI-H in a patient, and be used further to facilitate patient prognosis, monitor disease progression/regression, identify appropriate treatment regimes, and evaluate the efficacy of treatment.

[0006] In one aspect the invention provides a method for detecting the presence of colon cancer in an subject comprising: obtaining a biological sample from said subject; and detecting the presence of the sequence of one or more of SEQ ID Nos 1-34 in said sample, wherein the presence of said one or more sequences is indicative of colon cancer in said subject

[0007] In one embodiment, the step of determining the expression level of said sequence, wherein the overexpression of said sequence by at least 2 fold relative to the expression level of said sequence in a control subject known to not have colon cancer, is indicative of the presence of colon cancer in said subject.

[0008] In a further embodiment, the step of detecting comprises contacting said biological sample with a nucleic acid probe which hybridizes under stringent hybridization conditions to one or more of said sequences, under conditions which permit stringent hybridization; and detecting the hybridization of said nucleic acid probe to said one or more of said sequences, wherein detection of hybridization is indicative of the presence of said one or more sequences in said sample.

[0009] In one embodiment, the nucleic acid probe is detectably labeled.

[0010] In a further embodiment, the subject is a human.

[0011] In another aspect, the invention also provides a method of detecting the presence of colon cancer in a subject comprising: obtaining a biological sample from said subject; and detecting the presence of one or more of the amino acid sequences of SEQ ID Nos. 35-68 in said sample, wherein the presence of said one or more sequences is indicative of colon cancer in said subject.

[0012] In one embodiment, the step of detecting comprises contacting said biological sample with a polypeptide ligand which is capable of binding to said one or more amino acid sequences under conditions which permit said polypeptide ligand to bind to said one or more amino acid sequences; and detecting the binding of said polypeptide ligand to said one or more amino acid sequences, wherein detection of binding is indicative of the presence of said one or more amino acid sequences in said sample.

[0013] In one embodiment, the polypeptide ligand is an antibody.

[0014] In a further embodiment, the polypeptide ligand comprises a detectable label.

[0015] In one embodiment, the subject is human

[0016] In another aspect, the invention also provides a method of detecting microsatellite instability in an individual comprising: measuring the expression of the sequence of one or more of SEQ ID Nos 1-34 in said individual, wherein microsatellite instability is detected where said sequence is overexpressed by at least 2-fold compared to the expression of said sequence in an individual known to not have microsatellite instability.

[0017] In one embodiment, the step of measuring comprises: obtaining a colorectal tissue sample from said individual; contacting said sample with a nucleic acid probe which is capable of hybridizing under stringent hybridization conditions to said sequence of one or more of SEQ ID Nos 1-34; detecting hybridization of said nucleic acid probe to said sequence of one or more of SEQ ID Nos 1-34.

[0018] In one embodiment, the individual is a human.

[0019] In a further embodiment, the nucleic acid probe is detectably labeled.

[0020] In another aspect, the invention also provides a method of identifying colon tissue having microsatellite instability, comprising: obtaining a colon tissue sample from an individual; detecting the expression of one or more of the sequences of SEQ ID Nos 1-34, wherein colon tissue having microsatellite instability is detected if the expression of said one or more of the sequences of SEQ ID Nos 1-34 is at least 2-fold greater than that of the same sequence in a colon tissue sample known to not have microsatellite instability.

[0021] In one embodiment, the step of detecting comprises: contacting said colon tissue sample with a nucleic acid probe which is capable of hybridizing under stringent hybridization conditions to said one or more of the sequences of SEQ ID Nos 1-34; and detecting hybridization of said nucleic acid probe to said one or more sequences, wherein detection of hybridization is indicative of the expression of said one or more of the sequences of SEQ ID Nos 1-34.

[0022] In one embodiment, the nucleic acid probe is detectably labeled.

[0023] In one embodiment, the individual is a human.

[0024] In one embodiment, the colon tissue sample is a tumor sample.

[0025] In a further embodiment, the tumor is a malignant tumor.

[0026] In another aspect, the invention also provides a method of monitoring the onset, progression, or regression of cancer or a pre-malignant condition thereof in a subject, the method comprising: detecting in a biological sample of the subject at a first point in time, the expression of one or more nucleic acid sequences comprising one or more nucleic acid sequences selected from the group consisting of SEQ ID NOs: 1-34; repeating step (a) at a subsequent point in time; and comparing the expression level detected in steps (a) and (b), wherein a change in the expression level is indicative of progression of cancer or a pre- malignant condition thereof in the subject.

[0027] In one embodiment, the change in the expression level is either an increase or decrease.

[0028] In a further embodiment, the increase or decrease is an increase or decrease of at least 2 fold.

[0029] In another aspect, the present invention also provides a method of determining prognosis for cancer or a pre-malignant condition thereof in a subject, comprising: detecting in a biological sample of the subject, the expression level of one or more nucleic acid sequences comprising one or more nucleic acid sequences selected from the group consisting of SEQ ID NOs: 1-34; comparing the expression level detected in steps (a) with a reference expression level of said nucleic acid sequences; and evaluating the prognosis of the subject based on the comparison in step (b).

[0030] In one embodiment, the reference expression level is the expression level of said nucleic acid sequences in cancer free or normal sample.

[0031] In a further embodiment, the reference expression level is the expression level of said nucleic acid sequences in cancer samples that are known not to progress to aggressive form.

[0032] In one embodiment, the reference expression level is the expression level of said nucleic acid sequence in a MSS colon tumor.

[0033] In another aspect, the invention also provides a method of determining the efficacy of a test compound for inhibiting cancer in a subject, the method comprising comparing a) the expression level of one or more nucleic acid sequences in a first biological sample from the subject wherein the sample has been exposed to the test compound, with b) the expression level of said nucleic acid sequences in a second biological sample from the subject wherein the sample has not been exposed to the test compound, said nucleic acid sequences comprising one or more nucleic acid sequences selected from the group consisting of SEQ ID NOs: 1-34, wherein a change of at least two fold in the expression level of said nucleic acid sequences is an indication that the test compound is efficacious for inhibiting cancer in the subject.

[0034] In one embodiment, the change in the expression level is either an increase or decrease.

[0035] In a further aspect, the invention also provides a method of determining the efficacy of a therapy for inhibiting cancer in a subject, the method comprising comparing a) the expression level of one or more nucleic acid sequences in a first biological sample from the subject prior to providing at least a portion of the therapy to the subject, with b) the expression level of said nucleic acid sequences in a second biological sample from the subject following the provision of at least a portion of the therapy, said nucleic acid sequences comprising one or more nucleic acid sequences selected from the group consisting of SEQ ID NOs: 1-34, wherein a change of at least two fold in the expression level of said nucleic acid sequences is an indication that the therapy is efficacious for inhibiting cancer in the subject.

[0036] In one embodiment, the change in the expression level is either an increase or decrease.

[0037] In another aspect, the invention also provides a method of selecting a composition for inhibiting cancer in a subject, the method comprising: obtaining a first biological sample comprising cancer cells from the subject; separately exposing aliquots of the sample in the presence of a plurality of test compositions; comparing the expression level of one or more nucleic acid sequences in each of the aliquots from (b) with the expression level in the sample produced by (a), said nucleic acid sequences comprising one or more nucleic acid sequences selected from the group consisting of SEQ ID NOs: 1-34; and selecting one of the test compositions which induces a change of at least two fold in the expression level of said nucleic acid sequences in one aliquot containing the test composition.

[0038] In one embodiment, the change in the expression level is either an increase or decrease.

[0039] In another aspect, the invention also provides A method of monitoring the onset, progression, or regression of cancer in a subject, comprising: contacting at a first point in time a first biological sample with one or more polypeptide ligands that specifically bind to one or more polypeptides comprising a polypeptide sequence selected from the group consisting of SEQ ID NOs: 35-68, determining specific binding between the polypeptide ligands and the polypeptides; contacting at a subsequent point in time a second biological sample with said polypeptide ligands that specifically bind to one or more polypeptides comprising a polypeptide sequence selected from the group consisting of SEQ ID NOs: 35-68, determining specific binding between the polypeptide ligands and the polypeptides; and comparing the specific binding in the first biological sample to the specific binding in the second biological sample, wherein a significant change in the specific binding is an indication of the onset, progression, or regression of cancer.

[0040] In another aspect, the invention also provides a method of determining prognosis for cancer or a pre-malignant condition thereof in a subject, comprising: contacting a biological sample obtained from a subject having cancer with one or more polypeptide ligands that bind specifically to one or more polypeptides comprising a polypeptide sequence selected from the group consisting of SEQ ID NOs: 35-68; determining specific binding; comparing the specific binding between the polypeptide ligands and the polypeptides in the sample with the specific binding between the polypeptide ligands and the polypeptides either in a cancer-free sample or in a cancer sample that is known not to progress to aggressive form; and evaluating the prognosis of the subject based on the comparison in step (c).

[0041] In a still further aspect, the invention also provides a method of determining the efficacy of a test compound for inhibiting cancer in a subject, the method comprising comparing a) in a first biological sample from the subject binding between one or more polypeptide ligands that specifically bind to one or more polypeptides comprising a polypeptide sequence selected from the group consisting of SEQ ID NOs: 35-68 and one or more polypeptides comprising a polypeptide sequence selected from the group consisting of SEQ ID NOs: 35-68, wherein the sample has not been exposed to the test compound, with b) in a second biological sample from the subject, the specific binding of said polypeptide ligands and said polypeptides, wherein the sample has been exposed to the test compound, and wherein a significant change in the specific binding is an indication that the test compound is efficacious for inhibiting cancer in the subject.

[0042] In another aspect, the invention provides a method of determining the efficacy of a therapy for inhibiting cancer in a subject, comprising comparing a) in a first biological sample from the subject prior to a treatment, binding between one or more polypeptide ligands that specifically bind to one or more polypeptides comprising a polypeptide sequence selected from the group consisting of SEQ ID NOs: 35-68 and one or more polypeptides comprising a polypeptide sequence selected from the group consisting of SEQ ID NOs: 35-68, with b) in a second biological sample from the subject following the treatment, the specific binding of said polypeptide ligands and said polypeptides, and wherein a significant change in the specific binding is an indication that the test compound is efficacious for inhibiting cancer in the subject.

### BRIEF DESCRIPTION OF THE DRAWINGS

[0043] FIG. 1 shows the differential expression profile of the MSI-H marker gene REG4.

### DETAILED DESCRIPTION

[0044] Two primary mechanisms of genomic instability have been discovered to play a role in sporadic colorectal cancer. The first is known as chromosomal instability, and results from a series of genetic changes that involve the activation of a set of oncogenes such as ki-ras and inactivation of tumor suppressor genes such as p53 and APC. Cells displaying chromosomal instability exhibit large-scale chromosomal alterations such as loss of heterozygosity, affecting hundreds of thousands of DNA bases. The second, mechanism, known as microsatellite instability (MSI), was originally described in hereditary non-polyposis colon cancer, and is also found in 12-15% of sporadic colorectal cancers. The indications of MSI is the widespread mutation of short repetitive DNA sequences known as microsatellites. MSI tumors have a distinct phenotype, characterized by mucinous histology, prominent lymphocytic infiltration, proximal location (proximal to the splenic flexure), poor differentiation and, more favorable stage distribution (i.e., is identified at earlier stages of cancer progression) (See, e.g., Gervaz et al., 2003. Swiss Surg. 9:3). There is a need in the art for a method for rapid, and accurate detection of MSI tumors, and for reliable criteria for the determination of prognosis and treatment regime for patients with MSI colorectal tumors.

[0045] The present invention is based, in part, on the discovery that certain gene sequences are overexpressed in human colorectal tumors that are classified as microsatellite unstable (MSI-H; classification is described further below) relative to those tumors which do not show microsatellite instability (MSS). More specifically, the present invention relates to 34 gene sequences which are overexpressed by at least 2-fold in colorectal tumors with a high degree of microsatellite instability (MSI-H) relative to colorectal tumors which do not demonstrate microsatellite instability. Accordingly, in one embodiment, the discovery of gene overexpression in MSI-H colorectal tumors provides a means for the detection and prediction of colon cancer in an individual. The present invention provides a method whereby a biological sample may be obtained from an individual suspected of having colon cancer, and subsequently screened, using nucleic acid probes, to determine whether the one or more of the gene sequences described herein are overexpressed by at least 2-fold. Identification of at least 2-fold overexpression of one or more of the gene sequences of the invention permits one of skill in the art to classify the individual as having a colorectal cancer which is MSI-H vs. MSI-L vs. MSS, which provides the practitioner with valuable prognostic information for the individual. In a preferred embodiment, the present invention provides a method for determining the prognosis of, course of treatment for, efficacy of treatment for, and monitoring of progression and/or regression and/or recurrence of colorectal cancer in a patient, based on the overexpression of one or more of the MSI-H marker sequences of the invention.

[0046] Accordingly, the invention provides MSI specific markers (nucleic acid sequences: SEQ ID Nos 1-34; amino acid sequences: 35-68) which are useful for the detection of colorectal cancer, and microsatellite instability. The MSI-H markers may also be used according to the invention for the prediction of the occurrence of colorectal cancer, and for determining an individual's predisposition to the development of colorectal cancer.

[0047] Definitions

[0048] As used herein, “microsatellite instability” (MSI) refers to the expansion or contraction of short nucleotide repeats (microsatellites) within a tumor when compared to normal tissue. MSI does not describe a particular tumor phenotype but refers instead to the observation of instability at one or more given genetic marker. A microsatellite is DNA in which a short motif(usually one to five nucleotides long) is repeated several times. A typical mononucleotide-repeat microsatellite might be, for example, a stretch of 13 adenines, abbreviated (A)₁₃. The most common microsatellite in humans is a dinucleotide repeat of cytosine and adenine, (CA)ₙ, which occurs in tens of thousands of locations in our germ line. The microsattelite repeats are prone to expansion or contractions (lengthening or shortening) in meiosis. While these expansions or contractions are normally repaired by DNA mismatch repair proteins (MMR), defects in MMRs can result in the persistence of such microsatellite modification, which is then referred to as microsatellite instability. MSI is subdivided into three categories: MSI-H, MSI-L and MSS (microsatellite stable). MSI-H, MSI-L and MSS tumors are defined as described in Boland et al. (1998, Cancer Research 58:5248; discussed in further detail below).

[0049] As used herein, a “biological sample” refers to a tissue, cellular, or fluid sample obtained from an individual. A “biological sample”, as used herein, can refer to a cells, circulating cells (e.g., circulating cells in blood), cells obtained from specific anatomical locations, or specific cell types (e.g., colon cell, gastrointestinal cell, cancerous cell, etc.), a tissue sample, or physiological fluids such as lymph, bile, serum, plasma, urine, synovial fluid, blood, CSF, mucus membrane secretions, or other physiological samples such as stool. Preferably, the biological sample is colon tissue. An MSI associated marker of the invention, such as one or more of SEQ ID Nos 1-34, may be detected in a suitable “biological sample” where the suitability of a particular type of biological sample for the detection of a specific colorectal cancer associated marker may be readily determined by one of skill in the art.

[0050] As used herein, “detecting” refers to the identification of the presence or absence of a molecule in a sample. Where the molecule to be detected is a polypeptide, the step of detecting can be performed by binding the polypeptide with a peptide ligand, such as an antibody, that is detectably labeled. A detectable label is a molecule which is capable of generating, either independently, or in response to a stimulus, an observable signal. A detectable label can be, but is not limited to a fluorescent label, a chromogenic label, a luminescent label, or a radioactive label. Methods for “detecting” a label include quantitative and qualitative methods adapted for standard or confocal microscopy, FACS analysis, and those adapted for high throughput methods involving multiwell plates, arrays or microarrays. One of skill in the art can select appropriate filter sets and excitation energy sources for the detection of fluorescent emission from a given fluorescent polypeptide or dye. “Detecting” as used herein can also include the use of multiple peptide ligands to a polypeptide to be detected, wherein the multiple antibodies bind to different epitopes on the polypeptide to be detected. Antibodies used in this manner can employ two or more detectable labels, and can include, for example a FRET pair. A polypeptide molecule, such as one or more of SEQ ID Nos 35-68, is “detected” according to the present invention when the level of detectable signal is at all greater than the background level of the detectable label, or where the level of measured nucleic acid is at all greater than the level measured in a control sample.

[0051] As used herein, “detecting” as it refers to detecting the presence of a target nucleic acid molecule (e.g., a nucleic acid molecule of one or more of SEQ ID Nos 1-34) refers to a process wherein the signal generated by a directly or indirectly labeled probe nucleic acid molecule (capable of hybridizing to a target, e.g., a sequence of one or more of SEQ ID Nos 1-34 in a biological sample; e.g., in a cell by in situ hybridization) is measured or observed. Thus, detection of the probe nucleic acid is directly indicative of the presence, and thus the detection, of a target nucleic acid. For example, if the detectable label on the probe nucleic acid is a fluorescent label, the target nucleic acid is “detected” by observing or measuring the light emitted by the fluorescent label on the probe nucleic acid when it is excited by the appropriate wavelength, or if the detectable label is a fluorescence/quencher pair, the target nucleic acid is “detected” by observing or measuring the light emitted upon association or dissociation of the fluorescence/quencher pair present on the probe nucleic acid, wherein detection of the probe nucleic acid indicates detection of the target nucleic acid. If the detectable label is a radioactive label, the target nucleic acid, following hybridization with a radioactively labeled probe is “detected” by, for example, autoradiography. Methods and techniques for “detecting” fluorescent, radioactive, and other chemical labels may be found in Ausubel et al. (1995, Short Protocols in Molecular Biology, 3^{rd} Ed. John Wiley and Sons, Inc.). Alternatively, a nucleic acid may be “indirectly detected” wherein a moiety, such as an enzyme activity, is attached to a probe nucleic acid which will hybridize with the target allowing detection in the presence of an appropriate substrate, or a specific antigen or other marker allowing detection by addition of an antibody or other specific indicator. Alternatively, a target nucleic acid molecule can be detected by amplifying a nucleic acid sample prepared from a biological sample, using oligonucleotide primers which are specifically designed to hybridize with a portion of the target nucleic acid sequence. Quantative amplification methods, such as, but not limited to TaqMan, may also be used to “detect” a target nucleic acid according to the invention. A nucleic acid molecule is “detected” as used herein where the level of nucleic acid measured (such as by quantitative PCR), or the level of detectable signal provided by the detectable label is at all above the background or control level.

[0052] As used herein, “detecting” also refers further to the detection of colorectal cancer in a patient, preferably early detection, wherein “early” detection refers to the detection of colorectal cancer at Dukes stage A or preferably, prior to a time when the colorectal cancer is morphologically able to be classified in a particular Dukes stage. “Detecting” as used herein further refers to the detection of colorectal cancer recurrence in an individual, using the same detection criteria as indicated above. “Detecting” as used herein still further refers to the measuring of a change in the degree of colorectal cancer before and/or after treatment with a therapeutic agent. In this case, a change in the degree of colorectal cancer in response to a therapeutic agent refers to an increase or decrease in the expression of one or more of the MSI-H markers of the invention, or alternatively, in the amount of MSI-H marker polypeptide (e.g., one or more of SEQ ID Nos 35-68) present in a clinical sample by at least 10% in response to the presence of a therapeutic agent relative to the expression level in the absence of the therapeutic agent.

[0053] As used herein, the term “change in the expression level” refers to either an increase or a decrease of the expression level of a nucleotide sequence (e.g., measuring the level of nucleic acid expressed and/or measuring the level of protein produced) in a test sample from the control level by an amount greater than the standard error of the assay employed to assess expression. Preferably, the change is by at least about twice, and more preferably three, four, five or ten times that amount. For increase, the change is determined by comparing the expression level in the test sample to the control level. For decrease, the change is determined by comparing the control level to the expression level in the test sample. Alternatively, the decrease is determined by comparing the expression level in the test sample to the control level and the decrease in the expression level is by at least about 15%, 25%, 30%, 40%, 50%, 65%, 80%, or greater. The term “significant change in the specific binding” refers to either an increase or a decrease from the specific binding in the cancer-free sample by at least about 10%, 20%, 25%, 30%, preferably at least about 40%, 50%, more preferably at least about 60%, 70%, or 90%.

[0054] As used herein, the term “expression level of one or more nucleic acid sequences” refers to the amount of mRNA transcribed from the corresponding genes (or the amount of DNA transcribed to mRNA) that are present in a biological sample. The expression level can be detected with or without comparison to a level from a control sample or a level expected of a control sample.

[0055] As used herein, the term “control expression level of one or more nucleic acid sequences” refers to the amount of mRNA transcribed from the corresponding genes (or the amount of DNA transcribed to mRNA) that are present in a biological sample representative of healthy, cancer-free subjects. The term “control expression level” can also refer to an established level of mRNA representative of the cancer-free population, that has been previously established based on measurement from healthy, cancer-free subjects.

[0056] As used herein, an “MSI-H marker sequence” refers to the nucleic acid sequences of SEQ ID Nos 1-34 which encode the amino acid sequences of SEQ ID Nos 35-68, and which have been identified according to the present invention as being overexpressed in colorectal tumor tissue having microsatellite instability. MSI-H marker sequences according to the invention include both the nucleic acid sequences of SEQ ID Nos 1-34, and the amino acid sequences of SEQ ID Nos 35-68. The MSI-H marker sequences of the invention provide useful tools for the detection of colorectal cancer, the identification of microsatellite instability in a biological sample, and prediction of the development of colon cancer.

[0057] As used herein, the term “cancerous cell” or “cancer cell”, used either in the singular or plural form, refers to cells that have undergone a malignant transformation that makes them pathological to the host organism. Malignant transformation is a single- or multi-step process, which involves in part an alteration in the genetic makeup of the cell and/or the gene expression profile. Malignant transformation may occur either spontaneously, or via an event or combination of events such as drug or chemical treatment, radiation, fusion with other cells, viral infection, or activation or inactivation of particular genes. Malignant transformation may occur in vivo or in vitro, and can if necessary be experimentally induced. Malignant cells may be found within the well-defined tumor mass or may have metastasized to other physical locations. A feature of cancer cells is the tendency to grow in a manner that is uncontrollable by the host, but the pathology associated with a particular cancer cell may take any form. Primary cancer cells (that is, cells obtained from near the site of malignant transformation) can be readily distinguished from non-cancerous cells by well-established pathology techniques, particularly histological examination. The definition of a cancer cell, as used herein, includes not only a primary cancer cell, but any cell derived from a cancer cell ancestor. This includes metastasized cancer cells, and in vitro cultures and cell lines derived from cancer cells.

[0058] As used herein, the term “efficacy” refers to either inhibition to some extent, of cell growth causing or contributing to a cell proliferative disorder, or the inhibition, to some extent, of the production of factors (e.g., growth factors) causing or contributing to a cell proliferative disorder. A “therapeutic efficacy” refers to relief of one or more of the symptoms of a cell proliferative disorder. In reference to the treatment of a cancer, a therapeutic efficacy refers to one or more of the following: 1) reduction in the number of cancer cells; 2) reduction in tumor size; 3) inhibition (i.e., slowing to some extent, preferably stopping) of cancer cell infiltration into peripheral organs; 3) inhibition (i.e., slowing to some extent, preferably stopping) of tumor metastasis; 4) inhibition, to some extent, of tumor growth; and/or 5) relieving to some extent one or more of the symptoms associated with the disorder. In reference to the treatment of a cell proliferative disorder other than a cancer, a therapeutic efficacy refers to 1) either inhibition to some extent, of the growth of cells causing the disorder; 2) the inhibition, to some extent, of the production of factors (e.g., growth factors) causing the disorder; and/or 3) relieving to some extent one or more of the symptoms associated with the disorder.

[0059] As used herein, the term “detectable label” refers to a composition detectable by spectroscopic, photochemical, biochemical, immunochemical, or chemical means.

[0060] As used herein, the term “a polynucleotide probe” refers to a nucleic acid capable of binding to a target nucleic acid of complementary sequence through one or more types of chemical bonds, usually through complementary base pairing, usually through hydrogen bond formation. As used herein, a probe may include natural (i.e., A, G, C, or T) or modified on bases (7-deazaguanosine, inosine, etc.) or on sugar moiety. In addition, the bases in a probe may be joined by a linkage other than a phosphodiester bond, so long as it does not interfere with hybridization. Thus, for example, probes may be peptide nucleic acids in which the constituent bases are joined by peptide bonds rather than phosphodiester linkages. It will be understood by one of skill in the art that probes may bind target sequences lacking complete complementarity with the probe sequence depending upon the stringency of the hybridization conditions. The probes are preferably directly labeled as with isotopes, chromophores, lumiphores, chromogens, or indirectly labeled such as with biotin to which a streptavidin complex may later bind. By assaying for the presence or absence of the probe, one can detect the presence or absence of the select sequence or subsequence.

[0061] As used herein, the term “hybridization” refers to any process by which a strand of nucleic acid binds with a complementary strand through base pairing.

[0062] As used herein, the term “subject” refers to any human or non-human organism.

[0063] As used herein, “individual” refers to a mammal, preferably a human.

[0064] As used herein, a “ligand” refers to a molecule which is capable of binding a polypeptide or nucleic acid. A “polypeptide ligand” useful in the present invention includes, but is not limited to an antibody, a monoclonal antibody, a polyclonal antibody, an antibody fragment (e.g., Fv, scFV, or Fab), a small molecule, or a nucleic acid aptamer. A “ligand” as used herein can also refer to a “nucleic acid ligand”, such as an oligonucleotide, polynucleotide, DNA, RNA, mRNA, or cDNA, which is capable of binding to a complementary nucleic acid molecule, or polypeptide molecule.

[0065] The term “antibody” as used herein is intended to include whole antibodies, e.g., of any isotype (IgG, IgA, IgM, IgE, etc), and includes fragments thereof, and single-chain antibodies, which also are specifically reactive with a vertebrate, e.g., mammalian, protein. Antibodies can be fragmented using conventional techniques and the fragments screened for utility in the same manner as described above for whole antibodies. Thus, the term includes segments of proteolytically-cleaved or recombinantly-prepared portions of an antibody molecule that are capable of selectively reacting with a certain protein. Nonlimiting examples of such proteolytic and/or recombinant fragments include Fab, F(ab′)2, Fab′, Fv, and single chain antibodies (scFv) containing a V[L] and/or V[H] domain joined by a peptide linker. The scFv's may be covalently or non-covalently linked to form antibodies having two or more binding sites. The subject invention includes polyclonal, monoclonal, or other purified preparations of antibodies and recombinant antibodies.

[0066] As used herein, the term “nucleic acid” refers to polynucleotides such as deoxyribonucleic acid (DNA), and, where appropriate, ribonucleic acid (RNA). The term should also be understood to include, as equivalents, analogs of either RNA or DNA made from nucleotide analogs, and, as applicable to the embodiment being described, single (sense or antisense) and double-stranded polynucleotides. ESTs, chromosomes, cDNAs, mRNAs, and rRNAs are representative examples of molecules that may be referred to as nucleic acids.

[0067] The terms “protein”, “polypeptide”, and “peptide” are used interchangeably herein when referring to a gene product. As used herein, “polypeptide” refers to any kind of polypeptide such as peptides, human proteins, fragments of human proteins, proteins or fragments of proteins from non-human sources, engineered versions proteins or fragments of proteins, enzymes, antigens, drugs, molecules involved in cell signaling, such as receptor molecules, antibodies, including polypeptides of the immunoglobulin superfamily, such as antibody polypeptides or T-cell receptor polypeptides.

[0068] As used herein, the term “level of expression” or “expression level” refers to the measurable expression of a given nucleic acid. The level of expression of a nucleic acid is determined by methods well known in the art. The “level of expression” or an “expression level” may measured by hybridization analysis using labeled target nucleic acids according to methods well known in the art (see, for example, Ausubel et al., Short Protocols in Molecular Biology, 3^{rd} Ed. 1995, John Wiley and Sons, Inc.). The label on the target nucleic acid is a luminescent label, an enzymatic label, a radioactive label, a chemical label or a physical label. Preferably, the target nucleic acids are labeled with a fluorescent molecule. Preferred fluorescent labels include fluorescein, amino coumarin acetic acid, tetramethylrhodamine isothiocyanate (TRITC), Texas Red, Cy3 and Cy5. Alternatively, the “level of expression” can be measured by quantitative amplification protocols, such as TaqMan, known to those of skill in the art.

[0069] “Differential expression” as used herein refers to an increase or decrease in expression of a nucleic acid sequence of at least about 2 fold, at least about 3 fold, at least about 10 fold, or at least up to or greater than about 50 fold. Similarly, “overexpression” refers to an increase in the expression of a nucleic acid sequence of at least about 2 fold, at least about 3 fold, at least about 10 fold, or at least up to or greater than about 50 fold. In a preferred embodiment a sequence of one or more of SEQ ID Nos 1-34 is overexpressed if it is over expressed by an average of at least about 2 fold as measured in at least two individuals with colon cancer relative to the average expression level in at least two normal individuals, or alternatively, as measured in a colon cancer sample from an individual relative to an adjacent, healthy colon tissue sample. The method of determining the phenotype of a cell (e.g., detecting colon cancer or microsatellite instability) may comprise detecting the differential expression, relative to a normal cell, of at least one nucleic acid which hybridizes under stringent conditions one of SEQ ID Nos. 1-34, wherein the nucleic acid is differentially expressed by at least at least about 2 fold, at least about 3 fold, at least about 10 fold, or at least up to or greater than about 50 fold. Alternatively, the method of determining the phenotype of a cell may comprise detecting the differential expression, relative to a normal cell, of at least one nucleic acid comprising SEQ ID Nos 1-34.

[0070] As used herein, “stringent hybridization conditions” refers to conditions of temperature and buffer composition which permit hybridization of a first nucleic acid sequence to a second nucleic acid sequence, and preferably refers to either high or moderate stringency hybridization conditions. Therefore, “high stringency conditions” are those conditions wherein only nucleic acid sequences which are very similar to each other will hybridize. The sequences may be less similar to each other if they hybridize under moderate stringency conditions. The precise conditions determining the stringency of a particular hybridization include not only the ionic strength, temperature, and the concentration of destabilizing agents such as formamide, but also on factors such as the length of the nucleic acid sequences, their base composition, the percent of mismatched base pairs between the two sequences, and the frequency of occurrence of subsets of the sequences (e.g., small stretches of repeats) within other non-identical sequences. Washing is the step in which conditions are set so as to determine a minimum level of similarity between the sequences hybridizing with each other. Generally, from the lowest temperature at which only homologous hybridization occurs, a 1% mismatch between two sequences results in a 1° C. decrease in the melting temperature (Tₘ) for any chosen SSC concentration. Generally, a doubling of the concentration of SSC results in an increase in the Tₘ of about 17° C. Using these guidelines, the washing temperature can be determined empirically, depending on the level of mismatch sought. Hybridization and wash conditions are explained in Current Protocols in Molecular Biology (Ausubel, F. M. et al., eds., John Wiley & Sons, Inc., 1995, with supplemental updates) on pages 2.10.1 to 2.10.16, and 6.3.1 to 6.3.6.

[0071] “High stringency conditions”, as used herein, generally refers to hybridization at either (1) 1×SSC (10×SSC=3 M NaCl, 0.3 M Na₃-citrate.2H₂O (88 g/liter), pH to 7.0 with 1 M HCl), 1% SDS (sodium dodecyl sulfate), 0.1-2 mg/ml denatured salmon sperm DNA at 65° C.; (2) 1×SSC, 50% formamide, 1% SDS, 0.1-2 mg/ml denatured salmon sperm DNA at 42° C.; (3) 1% bovine serum albumen (fraction V), 1 mM Na₂.EDTA, 0.5 M NaHPO₄ (pH 7.2) (1 M NaHPO₄=134 g Na₂HPO₄.7H₂O, 4 ml 85% H₃PO₄ per liter), 7% SDS, 0.1-2 mg/ml denatured salmon sperm DNA at 65° C.; (4) 50% formamide, 5×SSC, 0.02 M Tris-HCl (pH 7.6), 1× Denhardt's solution (100×=10 g Ficoll 400, 10 g polyvinylpyrrolidone, 10 g bovine serum albumin (fraction V), water to 500 ml), 10% dextran sulfate, 1% SDS, 0.1-2 mg/ml denatured salmon sperm DNA at 42° C.; (5) 5×SSC, 5× Denhardt's solution, 1% SDS, 100:g/ml denatured salmon sperm DNA at 65° C.; or (6) 5×SSC, 5× Denhardt's solution, 50% formamide, 1% SDS, 100:g/ml denatured salmon sperm DNA at 42° C., with high stringency washes of either (1) 0.3-0.1×SSC, 0.1% SDS at 65° C.; or (2) 1 mM Na₂EDTA, 40 mM NaHPO₄ (pH 7.2), 1% SDS at 65° C. The above conditions are intended to be used for DNA- DNA hybrids of 50 base pairs or longer. Where the hybrid is believed to be less than 18 base pairs in length, the hybridization and wash temperatures should be 5-10° C. below that of the calculated Tₘ of the hybrid, where Tₘ in ° C.=(2× the number of A and T bases)+(4× the number of G and C bases). For hybrids believed to be about 18 to about 49 base pairs in length, the Tₘ in ° C.=(81.5° C.+16.6(log₁₀M)+0.41(% G+C)−0.61 (% formamide)-500/L), where “M” is the molarity of monovalent cations (e.g., Na⁺), and “L” is the length of the hybrid in base pairs.

[0072] “Moderate stringency conditions” refers to hybridization at either (1) 4×SSC, (10×SSC=3 M NaCl, 0.3 M Na₃-citrate.2H₂O (88 g/liter), pH to 7.0 with 1 M HCl), 1% SDS (sodium dodecyl sulfate), 0.1-2 mg/ml denatured salmon sperm DNA at 65° C.; (2) 4×SSC, 50% formamide, 1% SDS, 0.1-2 mg/ml denatured salmon sperm DNA at 42° C.; (3) 1% bovine serum albumen (fraction V), 1 mM Na₂.EDTA, 0.5 M NaHPO₄ (pH 7.2) (1 M NaHPO₄=134 g Na₂HPO₄.7H₂O, 4 ml 85% H₃PO₄ per liter), 7% SDS, 0.1-2 mg/ml denatured salmon sperm DNA at 65° C.; (4) 50% formamide, 5×SSC, 0.02 M Tris-HCl (pH 7.6), 1× Denhardt's solution (100×=10 g Ficoll 400, 10 g polyvinylpyrrolidone, 10 g bovine serum albumin (fraction V), water to 500 ml), 10% dextran sulfate, 1% SDS, 0.1-2 mg/ml denatured salmon sperm DNA at 42° C.; (5) 5×SSC, 5× Denhardt's solution, 1% SDS, 100 μg/ml denatured salmon sperm DNA at 65° C.; or (6) 5×SSC, 5× Denhardt's solution, 50% formamide, 1% SDS, 100:g/ml denatured salmon sperm DNA at 42° C., with moderate stringency washes of 1×SSC, 0.1% SDS at 65° C. The above conditions are intended to be used for DNA-DNA hybrids of 50 base pairs or longer. Where the hybrid is believed to be less than 18 base pairs in length, the hybridization and wash temperatures should be 5-10° C. below that of the calculated Tₘ of the hybrid, where Tₘ in ° C.=(2× the number of A and T bases)+(4× the number of G and C bases). For hybrids believed to be about 18 to about 49 base pairs in length, the Tₘ in ° C.=(81.5° C.+16.6(log₁₀M)+0.41(% G+C)−0.61 (% formamide)−500/L), where “M” is the molarity of monovalent cations (e.g., Na⁺), and “L” is the length of the hybrid in base pairs.

[0073] As used herein, the terms specific “binding” or “specifically binding”, refers to the interaction of an antibody and a protein or peptide. The interaction is dependent upon the presence of a particular structure (i.e., the antigenic determinant or epitope) on the protein; in other words, the antibody is recognizing and binding to a specific protein structure rather than to proteins in general. For example, if an antibody is specific for epitope A, the presence of a protein containing epitope A (or free, unlabeled A) in a reaction containing labeled “A” and the antibody will reduce the amount of labeled A bound to the antibody.

[0074] As used herein, a “predisposition to developing colon cancer” refers to a condition under which any given population of individuals who are “predisposed to developing colon cancer” will have an at least 10% increase in the incidence of colon cancer than a similar population not predisposed to developing colon cancer. As used herein, a “predisposition to developing colon cancer” also refers to a condition in an individual wherein the expression of one or more of the MSI-H marker sequences of the invention is identified in colon tissue of the individual as being overexpressed by at least 2-fold relative to the expression level in a normal individual.

MSI-H Marker Sequences

[0075] Microsatellite Instability

[0076] Microsatellite instability refers to the expansion or contraction of short nucleotide repeats (microsatellites) within a tumor when compared to normal tissue. MSI does not describe a particular tumor phenotype but refers instead to the observation of instability at a given genetic marker. MSI is divided into three subcategories. The first is characterized by MSI-H, wherein a majority of markers exhibit MSI; the second is MSI-L, wherein only a minority of markers exhibit MSI; and the third is MSS, wherein markers lack apparent instability. The MSI status of a given tumor is determined by looking at microsatellite instability in a panel of genetic markers, comprising two markers which include mononucleotide repeats (BAT26 and BAT25, GenBank Accession Nos. 9834508 and 9834505, respectively), and three markers having dinucleotide repeats (D5S346, D2S123, and D17S250, GenBank Accession Nos 181171, 187953, and 177030, respectively). Using this reference panel, MSI-H tumors are defined as having instability in two or more markers, while MSI-L tumors are defined as having instability in one marker. Tumors showing no apparent instability may be included in the MSS group. In addition to the five primary markers described above, additional markers may be examined for microsatellite instability including, but not limited to, BAT40, BAT34C4, TGF-β-R11, ACTC(635/636), D18S55, D18S58, D18S61, D18S64, D3S1029, D10S197, D13S175, D17S588, D5S107, D8S87, D18S69, D13S153, D17S787, D7S519, and D20S100. Where more than the primary panel of five markers is used, MSI-H is defined as having MSI in ≧30-40% of the markers tested, whereas the MSI-L group would exhibit MSI in <30-40% of the markers. A description of the criteria for characterizing MSI-H vs. MSI-L vs. MSS may be found, for example, in Boland et al., 1998, Cancer Research 58:5248, the contents of which are incorporated herein by reference.

[0077] The distinction between MSI-H and MSI-L/MSS tumors is important for the prognosis, treatment and monitoring of colorectal cancers. For example, MSI status (that is, the classification of a tumor as MSI-H, MSI-L, or MSS) has been shown to be a predictor of the benefit of adjuvant-based chemotherapy with fluorouracil in stage II and stage III colon cancers (Ribic et al., 2003 N. Engl. J. Med. 349:247). In addition, the proximal anatomical localization of MSI-H tumors has been linked to a more favorable outcome in patients (e.g., higher rate of survival; Boland et al.; Gervaz et al., 2003, Swiss Surg. 9:3; and Rubic et al.), and MSI-H tumors have been correlated to a more favorable stage distribution, with the majority of MSI-H tumors being grouped in Stage II colorectal cancers (Gervaz et al). Thus, as described further below, the identification and classification of colorectal tumors into MSI status provides the medical practitioner with critical information as to patient diagnosis, prognosis, and optimal treatment regime.

[0078] Traditionally, the MSI status of colorectal cancer tumors has been detected by genetic screens for the markers described above. This method of MSI staging is not trivial and is cumbersome and time consuming, requiring comparisons of normal to tumor DNA bands which have been separated out by, for example, polyacrylamide gel electrophoresis or other suitable method (see, for example, Bapat et al, 1999, Human Genetics 104:167). It is also generally accepted that the genetic detection of MSI using the marker panels described above should also include microdissection of the tumor tissue to enrich for tumor cell populations (see, e.g., Boland et al., Id.). In contrast, the present invention provides a means for determining the MSI status of a tumor by detecting the overexpression of one or more of the MSI-H marker genes described herein. The present invention thus, provides an alternative to the genetic (i.e., marker panel) approach for MSI detection which is used in the art to date, and is useful for determining the prognosis, staging, and treatment regime for a patient having a colorectal cancer.

[0079] The present invention related to the detection of colon cancer and microsatellite instability by detecting the overexpression of one or more of the MSI-H marker sequences disclosed herein. The present invention equally relates to the marker sequences themselves, which have been identified as being overexpressed by at least 2-fold in MSI-H colorectal tumors relative to normal colon tissue.

[0080] In addition the invention encompasses the detection of cancer by identifying the one or more of polypeptide sequences encoded by the MSI-H marker sequences in colon tissue or cells. Alternatively, the invention relates to a method for the detection of colorectal cancer in an individual wherein colorectal cancer is identified by detecting the overexpression of one or more MSI-H marker nucleic acid sequences and at least one additional colorectal cancer associated marker in the biological sample from an individual. MSI-H marker sequences of the invention include those having the nucleic acid sequence shown in one or more of SEQ ID Nos. 1-34, or alternatively, the polypeptide sequences encoded by the recited polynucleotide sequences as shown in SEQ ID Nos. 34-68.

[0081] The nucleic acid and amino acid sequences of the MSI-H markers are shown in SEQ ID Nos 1-34 and 35-68, respectively (as shown in Table 1 and the sequence listing). While the invention relates to the direct detection of the MSI-H marker sequences in a method for detecting colorectal cancer or MSI, the invention further relates to the detection of sequences complementary thereto, or a sequence which specifically hybridizes to a sequence of SEQ ID Nos. 1-34. The present invention also relates to the detection of colorectal cancer or MSI by detecting the presence, in a clinical sample, of a nucleic acid molecule which encodes the sequence of SEQ ID Nos. 35-68, or a fragment thereof.

[0082] Another aspect of the invention provides the detection of MSI-H by the detection of a nucleic acid which hybridizes under low, medium, or high stringency, preferably medium or high, conditions to a nucleic acid sequence represented by one or more of SEQ ID Nos. 1-34, or a sequence complementary thereto. Stringency conditions for hybridization refers to conditions of temperature and buffer composition which permit hybridization of a first nucleic acid sequence to a second nucleic acid sequence, wherein the conditions determine the degree of identity between those sequences which hybridize to each other. Therefore, “high stringency conditions” are those conditions wherein only nucleic acid sequences which are very similar to each other will hybridize. The sequences may be less similar to each other if they hybridize under moderate stringency conditions. Still less similarity is needed for two sequences to hybridize under low stringency conditions. By varying the hybridization conditions from a stringency level at which no hybridization occurs, to a level at which hybridization is first observed, conditions can be determined at which a given sequence will hybridize to those sequences that are most similar to it. The precise conditions determining the stringency of a particular hybridization include not only the ionic strength, temperature, and the concentration of destabilizing agents such as formamide, but also on factors such as the length of the nucleic acid sequences, their base composition, the percent of mismatched base pairs between the two sequences, and the frequency of occurrence of subsets of the sequences (e.g., small stretches of repeats) within other non-identical sequences. Washing is the step in which conditions are set so as to determine a minimum level of similarity between the sequences hybridizing with each other. Generally, from the lowest temperature at which only homologous hybridization occurs, a 1% mismatch between two sequences results in a 1° C. decrease in the melting temperature (Tm) for any chosen SSC concentration. Generally, a doubling of the concentration of SSC results in an increase in the Tₘ of about 17° C. Using these guidelines, the washing temperature can be determined empirically, depending on the level of mismatch sought. Hybridization and wash conditions are explained in Current Protocols in Molecular Biology (Ausubel, F. M. et al., eds., John Wiley & Sons, Inc., 1995, with supplemental updates) on pages 2.10.1 to 2.10.16, and 6.3.1 to 6.3.6.

[0083] High stringency conditions can employ hybridization at either (1) 1×SSC (10×SSC=3 M NaCl, 0.3 M Na₃-citrate.2H₂O (88 g/liter), pH to 7.0 with 1 M HCl), 1% SDS (sodium dodecyl sulfate), 0.1-2 mg/ml denatured salmon sperm DNA at 65° C., (2) 1×SSC, 50% formamide, 1% SDS, 0.1-2 mg/ml denatured salmon sperm DNA at 42° C., (3) 1% bovine serum albumen (fraction V), 1 mM Na₂.EDTA, 0.5 M NaHPO₄ (pH 7.2) (1 M NaHPO₄=134 g Na₂HPO₄.7H₂O, 4 ml 85% H₃PO₄ per liter), 7% SDS, 0.1-2 mg/ml denatured salmon sperm DNA at 65° C., (4) 50% formamide, 5×SSC, 0.02 M Tris-HCl (pH 7.6), 1× Denhardt's solution (100×=10 g Ficoll 400, 10 g polyvinylpyrrolidone, 10 g bovine serum albumin (fraction V), water to 500 ml), 10% dextran sulfate, 1% SDS, 0.1-2 mg/ml denatured salmon sperm DNA at 42° C., (5) 5×SSC, 5× Denhardt's solution, 1% SDS, 100:g/ml denatured salmon sperm DNA at 65° C., or (6) 5×SSC, 5× Denhardt's solution, 50% formamide, 1% SDS, 100:g/ml denatured salmon sperm DNA at 42° C., with high stringency washes of either (1) 0.3-0.1×SSC, 0.1% SDS at 65° C., or (2) 1 mM Na₂EDTA, 40 mM NaHPO₄ (pH 7.2), 1% SDS at 65° C. The above conditions are intended to be used for DNA-DNA hybrids of 50 base pairs or longer. Where the hybrid is believed to be less than 18 base pairs in length, the hybridization and wash temperatures should be 5-10° C. below that of the calculated Tₘ of the hybrid, where Tₘ in ° C.=(2× the number of A and T bases)+(4× the number of G and C bases). For hybrids believed to be about 18 to about 49 base pairs in length, the Tₘ in ° C.=(81.5° C.+16.6(log₁₀M)+0.41(% G+C)−0.61 (% formamide)−500/L), where “M” is the molarity of monovalent cations (e.g., Na⁺), and “L” is the length of the hybrid in base pairs.

[0084] Moderate stringency conditions can employ hybridization at either (1) 4×SSC, (10×SSC=3 M NaCl, 0.3 M Na₃-citrate.2H₂O (88 g/liter), pH to 7.0 with 1 M HCl), 1% SDS (sodium dodecyl sulfate), 0.1-2 mg/ml denatured salmon sperm DNA at 65° C., (2) 4×SSC, 50% formamide, 1% SDS, 0.1-2 mg/ml denatured salmon sperm DNA at 42° C., (3) 1% bovine serum albumen (fraction V), 1 mM Na₂.EDTA, 0.5 M NaHPO₄ (pH 7.2) (1 M NaHPO₄=134 g Na₂HPO₄.7H₂O, 4 ml 85% H₃PO₄ per liter), 7% SDS, 0.1-2 mg/ml denatured salmon sperm DNA at 65° C., (4) 50% formamide, 5×SSC, 0.02 M Tris-HCl (pH 7.6), 1× Denhardt's solution (100×=10 g Ficoll 400, 10 g polyvinylpyrrolidone, 10 g bovine serum albumin (fraction V), water to 500 ml), 10% dextran sulfate, 1% SDS, 0.1-2 mg/ml denatured salmon sperm DNA at 42° C., (5) 5×SSC, 5× Denhardt's solution, 1% SDS, 100 □g/ml denatured salmon sperm DNA at 65° C., or (6) 5×SSC, 5× Denhardt's solution, 50% formamide, 1% SDS, 100:g/ml denatured salmon sperm DNA at 42° C., with moderate stringency washes of 1×SSC, 0.1% SDS at 65° C. The above conditions are intended to be used for DNA-DNA hybrids of 50 base pairs or longer. Where the hybrid is believed to be less than 18 base pairs in length, the hybridization and wash temperatures should be 5-110° C. below that of the calculated Tₘ of the hybrid, where Tₘ in ° C.=(2× the number of A and T bases)+(4× the number of G and C bases). For hybrids believed to be about 18 to about 49 base pairs in length, the Tₘ in ° C.=(81.5° C.+16.6(log₁₀M)+0.41(% G+C)−0.61 (% formamide)−500/L), where “M” is the molarity of monovalent cations (e.g., Na⁺), and “L” is the length of the hybrid in base pairs.

[0085] Low stringency conditions can employ hybridization at either (1) 4×SSC, (10×SSC=3 M NaCl, 0.3 M Na₃-citrate.2H₂O (88 g/liter), pH to 7.0 with 1 M HCl), 1% SDS (sodium dodecyl sulfate), 0.1-2 mg/ml denatured salmon sperm DNA at 50° C., (2) 6×SSC, 50% formamide, 1% SDS, 0.1-2 mg/ml denatured salmon sperm DNA at 40° C., (3) 1% bovine serum albumen (fraction V), 1 mM Na₂.EDTA, 0.5 M NaHPO₄ (pH 7.2) (1 M NaHPO₄=134 g Na₂HPO₄.7H₂O, 4 ml 85% H₃PO₄ per liter), 7% SDS, 0.1-2 mg/ml denatured salmon sperm DNA at 50° C., (4) 50% formamide, 5×SSC, 0.02 M Tris-HCl (pH 7.6), 1× Denhardt's solution (100×=10 g Ficoll 400, 10 g polyvinylpyrrolidone, 10 g bovine serum albumin (fraction V), water to 500 ml), 10% dextran sulfate, 1% SDS, 0.1-2 mg/ml denatured salmon sperm DNA at 40° C., (5) 5×SSC, 5× Denhardt's solution, 1% SDS, 100:g/ml denatured salmon sperm DNA at 50° C., or (6) 5×SSC, 5× Denhardt's solution, 50% formamide, 1% SDS, 100:g/ml denatured salmon sperm DNA at 40° C., with low stringency washes of either 2×SSC, 0.1% SDS at 50° C., or (2) 0.5% bovine serum albumin (fraction V), 1 mM Na₂EDTA, 40 mM NaHPO₄ (pH 7.2), 5% SDS. The above conditions are intended to be used for DNA-DNA hybrids of 50 base pairs or longer. Where the hybrid is believed to be less than 18 base pairs in length, the hybridization and wash temperatures should be 5-10° C. below that of the calculated Tₘ of the hybrid, where Tₘ in ° C.=(2× the number of A and T bases)+(4× the number of G and C bases). For hybrids believed to be about 18 to about 49 base pairs in length, the Tₘ in ° C.=(81.5° C.+16.6(log₁₀M)+0.41(% G+C)−0.61 (% formamide)−500/L), where “M” is the molarity of monovalent cations (e.g., Na⁺), and “L” is the length of the hybrid in base pairs.

[0086] Detection of MSI-H marker nucleic acids having a sequence that differs from the nucleotide sequences shown in SEQ ID Nos. 1-34, or a sequence complementary thereto, due to degeneracy in the genetic code, are also within the scope of the invention. Such nucleic acids encode functionally equivalent peptides (i.e., a peptide having equivalent or similar biological activity) but differ in sequence from the sequence shown in the sequence listing due to degeneracy in the genetic code. For example, a number of amino acids are designated by more than one triplet. Codons that specify the same amino acid, or synonyms (for example, CAU and CAC each encode histidine) may result in “silent” mutations which do not affect the amino acid sequence of a polypeptide. However, it is expected that DNA sequence polymorphisms that do lead to changes in the amino acid sequences of the subject polypeptides will exist among mammals. One skilled in the art will appreciate that these variations in one or more nucleotides (e.g., up to about 3-5% of the nucleotides) of the nucleic acids encoding polypeptides having an activity of a polypeptide may exist among individuals of a given species due to natural allelic variation.

[0087] The invention also includes within its scope a polynucleotide probe or primer which hybridizes under stringent conditions (at least about 4×SSC at 65° C., or at least about 4×SSC at 42° C.; see, for example, U.S. Pat. No. 5,707,829, incorporated herein by reference) with at least 15 contiguous nucleotides of one of SEQ ID Nos. 1-34. By this is intended that when at least 15 contiguous nucleotides of SEQ ID Nos. 1-34 is used as a probe, the probe will preferentially hybridize with a gene or mRNA (of the biological material) comprising the complementary sequence, allowing the identification and detection of the nucleic acids of the biological material that uniquely hybridize to the selected probe. Probes of more than 15 nucleotides can be used, but 15 nucleotides represents enough sequence for unique identification.

[0088] Constructs of polynucleotides having the sequence of one or more of SEQ ID Nos. 1-34, a portion thereof, or a sequence complementary thereto, and useful, for example for generating a probe, can be produced synthetically, or obtained from natural sources (e.g., human cells) using methods well known to those of skill in the art (see, for example, Sambrook et al., Molecular Cloning: A Laboratory Manual, 2nd Ed. (Cold Spring Harbor Press, Cold Spring Harbor, N.Y. 1989).

[0089] In one embodiment, the MSI-H marker polynucleotide sequences of the invention include those sequences which are at least about 70%, 75%, 80%, 90%, 95%, 97%, or 98% identical to one or more of the sequences of SEQ ID NOS 1-34. Alternatively, the invention includes MSI-H marker polypeptides which can be detected and are thus indicative of colorectal cancer in an individual that are encoded by nucleic acid sequences at least about 70%, 75%, 80%, 90%, 95%, 97%, or 98% identical to a mRNA sequence complementary to the nucleic acid sequence of SEQ ID Nos. 1-34. Particularly preferred polypeptides are those of SEQ ID Nos. 35-68, or fragments thereof, or polypeptide sequences which are at least about 70%, 75%, 80%, 90%, 95%, 98% or 99% identical in sequence to the amino acid sequence of one or more of SEQ ID Nos. 35-68.

[0090] In addition to a method for detecting colorectal cancer by identifying the overexpression of one or more of the MSI-H marker polynucleotide sequences or MSI-H marker polypeptides in a biological sample from an individual, the invention further comprises a method of detecting cancer by identifying the presence of one or more MSI-H markers in addition to at least one other colorectal cancer associated marker in the same sample (e.g., in the same serum, tissue, or cell sample).

[0091] Marker Panels

[0092] In one embodiment of the present invention, a biological sample from an individual is screened against a panel of two or more MSI-H markers. That is, a method of detecting MSI-H is provided whereby MSI-H is said to be detected where two or more of the MSI-H marker sequences of SEQ ID Nos 1-34 are identified as overexpressed by at least 2 fold relative to the same sequences in a biological sample known to not be cancerous.

[0093] In a further embodiment, one or more of the MSI-H marker sequences of the present invention may be combined in a panel with one or more additional colorectal cancer specific markers, including marker nucleic acid and amino acid sequences. A “colorectal cancer associated marker” useful in the present invention, refers to a polypeptide or nucleic acid sequence which exhibits over- or underexpression of at least 10% in colorectal cancer cells, tissue, or serum obtained from an individual having colorectal cancer, relative to the level of expression in cells, tissue, or serum obtained from an individual that does not have colorectal cancer. Table 2 below shows a list of “colorectal cancer associated markers” useful in the invention (although colorectal cancer associated markers useful in the invention are not limited to those shown in Table 2), and there correspondence with the sequences set forth in the “Sequence listing”.

TABLE 1

| SEQ ID | Gene | | |
|---|---|---|---|
| NO | Symbol | Length | Type |
| 69 | CEACAM5 | 2974 | DNA |
| 70 | AFP | 2032 | DNA |
| 71 | IL8 | 1639 | DNA |
| 72 | SPP1 | 1524 | DNA |
| 73 | KIAA1077 | 5500 | DNA |
| 74 | MMP12 | 1778 | DNA |
| 75 | UBD | 777 | DNA |
| 76 | COL1A1 | 5921 | DNA |
| 77 | LUM | 1804 | DNA |
| 78 | ENC1 | 4827 | DNA |
| 79 | PIGPC1 | 1098 | DNA |
| 80 | GTF3A | 1381 | DNA |
| 81 | CTSB | 1978 | DNA |
| 82 | MCJ | 1074 | DNA |
| 83 | SLC12A2 | 4098 | DNA |
| 84 | C20orf42 | 3120 | DNA |
| 85 | SDBCAG84 | 1337 | DNA |
| 86 | NAP1L1 | 2908 | DNA |
| 87 | OSF-2 | 3213 | DNA |
| 88 | COL6A3 | 10558 | DNA |
| 89 | SPARC | 2133 | DNA |
| 90 | TGFBI | 2691 | DNA |
| 91 | FN1 | 8027 | DNA |
| 92 | COL1A2 | 5084 | DNA |
| 93 | S100A11 | 595 | DNA |
| 94 | LC27 | 2116 | DNA |
| 95 | IRAK1 | 3583 | DNA |
| 96 | IFITM2 | 905 | DNA |
| 97 | TIMP1 | 782 | DNA |
| 98 | IGFBP7 | 1124 | DNA |
| 99 | IFITM1 | 647 | DNA |
| 100 | COL3A1 | 5489 | DNA |
| 101 | IGFBP5 | 1722 | DNA |
| 102 | RegIV | 1200 | DNA |
| 103 | AGR2 | 1701 | DNA |
| 104 | HSPCA | 2259 | DNA |
| 105 | KIAA1199 | 7080 | DNA |
| 106 | MMP1 | 1973 | DNA |
| 107 | MMP7 | 1127 | DNA |
| 108 | TSC | 1163 | DNA |
| 109 | HAIK1 | 2007 | DNA |
| 110 | DAP3 | 1650 | DNA |
| 111 | | 2566 | DNA |
| 112 | | 2067 | DNA |
| 113 | KRT8 | 1752 | DNA |
| 114 | KRT18 | 1412 | DNA |
| 115 | KRT19 | 1407 | DNA |
| 116 | KRT20 | 1723 | DNA |
| 117 | MUC1 | 4139 | DNA |
| 118 | MUC2 | 15720 | DNA |
| 119 | MUC3 | 4707 | DNA |
| 120 | MUC5AC | 4151 | DNA |
| 121 | CGB5 | 880 | DNA |
| 122 | EGFR | 5532 | DNA |
| 123 | ERBB2 | 4530 | DNA |
| 124 | FTH1 | 801 | DNA |
| 125 | FTL | 878 | DNA |
| 126 | ALPP | 2747 | DNA |
| 127 | ODC1 | 2062 | DNA |
| 128 | MUC16 | 3557 | DNA |
| 129 | CEACAM1 | 3464 | DNA |
| 130 | CEACAM3 | 1022 | DNA |
| 131 | CEACAM4 | 1190 | DNA |
| 132 | CEACAM6 | 2249 | DNA |
| 133 | CEACAM7 | 2292 | DNA |
| 134 | CEACAM8 | 2297 | DNA |
| 135 | CA9 | 1552 | DNA |
| 136 | CEACAM5 | 702 | Protein |
| 137 | AFP | 609 | Protein |
| 138 | IL8 | 99 | Protein |
| 139 | SPP1 | 300 | Protein |
| 140 | KIAA1077 | 871 | Protein |
| 141 | MMP12 | 470 | Protein |
| 142 | UBD | 165 | Protein |
| 143 | COL1A1 | 1464 | Protein |
| 144 | LUM | 338 | Protein |
| 145 | ENC1 | 589 | Protein |
| 146 | PIGPC1 | 193 | Protein |
| 147 | GTF3A | 423 | Protein |
| 148 | CTSB | 339 | Protein |
| 149 | MCJ | 150 | Protein |
| 150 | SLC12A2 | 1212 | Protein |
| 151 | C20orf42 | 230 | Protein |
| 152 | SDBCAG84 | 383 | Protein |
| 153 | NAP1L1 | 391 | Protein |
| 154 | OSF-2 | 836 | Protein |
| 155 | COL6A3 | 3176 | Protein |
| 156 | SPARC | 303 | Protein |
| 157 | TGFBI | 683 | Protein |
| 158 | FN1 | 2355 | Protein |
| 159 | COL1A2 | 1366 | Protein |
| 160 | S100A11 | 105 | Protein |
| 161 | LC27 | 283 | Protein |
| 162 | IRAK1 | 712 | Protein |
| 163 | IFITM2 | 132 | Protein |
| 164 | TIMP1 | 207 | Protein |
| 165 | IGFBP7 | 282 | Protein |
| 166 | IFITM1 | 125 | Protein |
| 167 | COL3A1 | 1466 | Protein |
| 168 | IGFBP5 | 272 | Protein |
| 169 | RegIV | 158 | Protein |
| 170 | AGR2 | 175 | Protein |
| 171 | HSPCA | 732 | Protein |
| 172 | KIAA1199 | 1361 | Protein |
| 173 | MMP1 | 469 | Protein |
| 174 | MMP7 | 267 | Protein |
| 175 | TSC | 216 | Protein |
| 176 | HAIK1 | 422 | Protein |
| 177 | DAP3 | 398 | Protein |
| 178 | | 75 | Protein |
| 179 | | 163 | Protein |
| 180 | KRT8 | 483 | Protein |
| 181 | KRT18 | 430 | Protein |
| 182 | KRT19 | 400 | Protein |
| 183 | KRT20 | 424 | Protein |
| 184 | MUC1 | 1255 | Protein |
| 185 | MUC2 | 5179 | Protein |
| 186 | MUC3 | 1217 | Protein |
| 187 | MUC5AC | 1373 | Protein |
| 188 | CGB5 | 165 | Protein |
| 189 | EGFR | 1210 | Protein |
| 190 | ERBB2 | 1255 | Protein |
| 191 | FTH1 | 190 | Protein |
| 192 | FTL | 175 | Protein |
| 193 | ALPP | 535 | Protein |
| 194 | ODC1 | 461 | Protein |
| 195 | MUC16 | 1148 | Protein |
| 196 | CEACAM1 | 526 | Protein |
| 197 | CEACAM3 | 212 | Protein |
| 198 | CEACAM4 | 244 | Protein |
| 199 | CEACAM6 | 344 | Protein |
| 200 | CEACAM7 | 265 | Protein |
| 201 | CEACAM8 | 349 | Protein |
| 202 | CA9 | 459 | Protein |

Additional non-limiting examples of colorectal cancer associated markers, as used in the present invention, may be a carbohydrate epitope present on a polypeptide or nucleic acid molecule and/or an antibody molecule which recognizes and is capable of binding to such an epitope, wherein the carbohydrate epitope is known to be associated with the presence of colorectal cancer in an individual. Such carbohydrate epitopes may be present on more than one unrelated protein or polypeptide. In one embodiment, such a carbohydrate epitope is CA 19-9, also known as sialyl-Lewis^{a}, is a tumor marker defined by a monoclonal antibody as a carbohydrate epitope, related to the blood group antigens, composed of a branching, 5-sugar structure covalently bound to a variety of glycoproteins or glycolipids. The proteins primarily belong to the mucin family and the lipids are usually membrane associated. The CA 19-9 epitope is typically the terminal moiety of a complex, O-linked carbohydrate structure on either macromolecule. Other tumor markers also defined as various carbohydrate epitopes useful in the present invention as a “colorectal cancer associated marker” include CA72-4 which is indicative of the presence of the Tag 72 antigen, which is a triply sialylated Tn antigen on varying protein backbones; Thomsen Freidenreich antigen (TF), which is a sialylated n-acetyl galactosamine moiety O-linked to various peptides; Tn and sialyated Tn (sTn) which is the backbone of the TF antigen without the terminal n-acetyl galactosamine moiety, O-linked to various peptides; CA 50 which is an epitope corresponding to sialylated Lewis A blood group antigen; CA 549 which is a CHO moiety on muc-1; CA 242 which is a sialylated CHO; LASA which is a lipid associated sialic acid, that is, a lipid without a protein associated to it; Du-PAN's 1-5, which are pancreatic associated mucin-like CHO antigens. These useful colon cancer specific antigens and others are known in the art and are described, for example, in “Serological Cancer Markers” Sell, S., Ed. 1992. Humana Press Inc., Totowa, N.J.

[0094] Calculation of Sequence Homology

[0095] In one embodiment, the present invention relates to the detection of MSI-H in an individual by detecting the presence of a MSI-H marker sequence or a sequence homologous thereto, by using probes and/or primers which are complementary to portions of the MSI-H marker sequence, or are sufficiently homologous to portions of the MSI-H marker sequence to permit hybridization of the probes and/or primers to the MSI-H marker sequence under high stringency conditions. Sequences of the invention are at least 50% homologous to the MSI-H markers of SEQ ID Nos 1-34, and are preferably 60%, 70%, 80%, 90% homologous up to complete sequence identity with MSI-H marker sequences (or optionally to a sequence encoding one or more additional colorectal cancer associated markers).

[0096] Sequence identity with respect to any of the sequences presented herein can be determined by a simple “eyeball” comparison (i.e. a strict comparison) of any one or more of the sequences with another sequence to see if that other sequence has, for example, at least 80% sequence identity to the sequence(s).

[0097] Relative sequence identity can also be determined by commercially available computer programs that can calculate % identity between two or more sequences using any suitable algorithm for determining identity, using for example default parameters. A typical example of such a computer program is CLUSTAL. Other computer program methods to determine identity and similarity between two sequences include but are not limited to the GCG program package (Devereux et al 1984 Nucleic Acids Research 12: 387) and FASTA (Atschul et al 1990 J Molec Biol 403-410). % homology may be calculated over contiguous sequences, i.e. one sequence is aligned with the other sequence and each amino acid in one sequence is directly compared with the corresponding amino acid in the other sequence, one residue at a time. This is called an “ungapped” alignment. Typically, such ungapped alignments are performed only over a relatively short number of residues.

[0098] Although this is a very simple and consistent method, it fails to take into consideration that, for example, in an otherwise identical pair of sequences, one insertion or deletion will cause the following amino acid residues to be put out of alignment, thus potentially resulting in a large reduction in % homology when a global alignment is performed. Consequently, most sequence comparison methods are designed to produce optimal alignments that take into consideration possible insertions and deletions without penalizing unduly the overall homology score. This is achieved by inserting “gaps” in the sequence alignment to try to maximize local homology.

[0099] However, these more complex methods assign “gap penalties” to each gap that occurs in the alignment so that, for the same number of identical amino acids, a sequence alignment with as few gaps as possible—reflecting higher relatedness between the two compared sequences—will achieve a higher score than one with many gaps. “Affinity gap costs” are typically used that charge a relatively high cost for the existence of a gap and a smaller penalty for each subsequent residue in the gap. This is the most commonly used gap scoring system. High gap penalties will of course produce optimized alignments with fewer gaps. Most alignment programs allow the gap penalties to be modified. However, it is preferred to use the default values when using such software for sequence comparisons. For example, when using the GCG Wisconsin Bestfit package the default gap penalty for amino acid sequences is −12 for a gap and −4 for each extension.

[0100] Calculation of maximum % homology therefore firstly requires the production of an optimal alignment, taking into consideration gap penalties. A suitable computer program for carrying out such an alignment is the GCG Wisconsin Bestfit package (University of Wisconsin, U.S.A.; Devereux et al., 1984, Nucleic Acids Research 12:387). Examples of other software that can perform sequence comparisons include, but are not limited to, the BLAST package (Ausubel et al., 1995, Short Protocols in Molecular Biology, 3rd Edition, John Wiley & Sons), FASTA (Atschul et al., 1990, J. Mol. Biol., 403-410) and the GENEWORKS suite of comparison tools. Both BLAST and FASTA are available for offline and online searching (Ausubel et al., 1999 supra, pages 7-58 to 7-60).

[0101] Although the final % homology can be measured in terms of identity, the alignment process itself is typically not based on an all-or -nothing pair comparison. Instead, a scaled similarity score matrix is generally used that assigns scores to each pairwise comparison based on chemical similarity or evolutionary distance. An example of such a matrix commonly used is the BLOSUM62 matrix—the default matrix for the BLAST suite of programs. GCG Wisconsin programs generally use either the public default values or a custom symbol comparison table if supplied. It is preferred to use the public default values for the GCG package, or in the case of other software, the default matrix, such as BLOSUM62.

[0102] Advantageously, the BLAST algorithm is employed, with parameters set to default values. The BLAST algorithm is described in detail on the World Wide Web at ncbi.nih.gov/BLAST/blast_help.html, which is incorporated herein by reference. The search parameters are defined as follows, and can be advantageously set to the defined default parameters.

[0103] Advantageously, “substantial identity” when assessed by BLAST equates to sequences which match with an EXPECT value of at least about 7, preferably at least about 9 and most preferably 10 or more. The default threshold for EXPECT in BLAST searching is usually 10.

[0104] BLAST (Basic Local Alignment Search Tool) is the heuristic search algorithm employed by the programs blastp, blastn, blastx, tblastn, and tblastx; these programs ascribe significance to their findings using the statistical methods of Karlin and Altschul (Karlin and Altschul 1990, Proc. Natl. Acad. Sci. USA 87:2264-68; Karlin and Altschul, 1993, Proc. Natl. Acad. Sci. USA 90:5873-7; see http://www.ncbi.nih.gov/BLAST/blast_help.html) with a few enhancements. The BLAST programs are tailored for sequence similarity searching, for example to identify homologues to a query sequence. For a discussion of basic issues in similarity searching of sequence databases, see Altschul et al (1994) Nature Genetics 6:119-129.

[0105] The five BLAST programs available on the World Wide Web at ncbi.nlm.nih.gov perform the following tasks: blastp—compares an amino acid query sequence against a protein sequence database; blastn—compares a nucleotide query sequence against a nucleotide sequence database; blastx—compares the six-frame conceptual translation products of a nucleotide query sequence (both strands) against a protein sequence database; tblastn—compares a protein query sequence against a nucleotide sequence database dynamically translated in all six reading frames (both strands); tblastx—compares the six-frame translations of a nucleotide query sequence against the six-frame translations of a nucleotide sequence database.

[0106] BLAST uses the following search parameters:

[0107] HISTOGRAM—Display a histogram of scores for each search; default is yes. (See parameter H in the BLAST Manual).

[0108] DESCRIPTIONS—Restricts the number of short descriptions of matching sequences reported to the number specified; default limit is 100 descriptions. (See parameter V in the manual page).

[0109] EXPECT—The statistical significance threshold for reporting matches against database sequences; the default value is 10, such that 10 matches are expected to be found merely by chance, according to the stochastic model of Karlin and Altschul (1990). If the statistical significance ascribed to a match is greater than the EXPECT threshold, the match will not be reported. Lower EXPECT thresholds are more stringent, leading to fewer chance matches being reported. Fractional values are acceptable. (See parameter E in the BLAST Manual).

[0110] CUTOFF—Cutoff score for reporting high-scoring segment pairs. The default value is calculated from the EXPECT value (see above). HSPs are reported for a database sequence only if the statistical significance ascribed to them is at least as high as would be ascribed to a lone HSP having a score equal to the CUTOFF value. Higher CUTOFF values are more stringent, leading to fewer chance matches being reported. (See parameter S in the BLAST Manual). Typically, significance thresholds can be more intuitively managed using EXPECT.

[0111] ALIGNMENTS—Restricts database sequences to the number specified for which high- scoring segment pairs (HSPs) are reported; the default limit is 50. If more database sequences than this happen to satisfy the statistical significance threshold for reporting (see EXPECT and CUTOFF below), only the matches ascribed the greatest statistical significance are reported. (See parameter B in the BLAST Manual).

[0112] MATRIX—Specify an alternate scoring matrix for BLASTP, BLASTX, TBLASTN and TBLASTX. The default matrix is BLOSUM62 (Henikoff & Henikoff, 1992). The valid alternative choices include: PAM40, PAM120, PAM250 and IDENTITY. No alternate scoring matrices are available for BLASTN; specifying the MATRIX directive in BLASTN requests returns an error response.

[0113] STRAND—Restrict a TBLASTN search to just the top or bottom strand of the database sequences; or restrict a BLASTN, BLASTX or TBLASTX search to just reading frames on the top or bottom strand of the query sequence.

[0114] FILTER—Mask off segments of the query sequence that have low compositional complexity, as determined by the SEG program of Wootton & Federhen (1993) Computers and Chemistry 17:149-163, or segments consisting of short-periodicity internal repeats, as determined by the XNU program of Claverie & States (1993) Computers and Chemistry 17:191-201, or, for BLASTN, by the DUST program of Tatusov and Lipman (see http://www.ncbi.nlm.nih.gov). Filtering can eliminate statistically significant but biologically uninteresting reports from the blast output (e.g., hits against common acidic-, basic- or proline- rich regions), leaving the more biologically interesting regions of the query sequence available for specific matching against database sequences.

[0115] Low complexity sequence found by a filter program is substituted using the letter “N” in nucleotide sequence (e.g., “NNNNNNNNNNNN”) and the letter “X” in protein sequences (e.g., “XXXXXXXX”).

[0116] Filtering is only applied to the query sequence (or its translation products), not to database sequences. Default filtering is DUST for BLASTN, SEG for other programs.

[0117] It is not unusual for nothing at all to be masked by SEG, XNU, or both, when applied to sequences in SWISS-PROT, so filtering should not be expected to always yield an effect. Furthermore, in some cases, sequences are masked in their entirety, indicating that the statistical significance of any matches reported against the unfiltered query sequence should be suspect.

[0118] NCBI-gi—Causes NCBI gi identifiers to be shown in the output, in addition to the accession and/or locus name.

[0119] Most preferably, sequence comparisons are conducted using the simple BLAST search algorithm provided on the World Wide Web at ncbi.nlm.nih.gov/BLAST. In some embodiments of the present invention, no gap penalties are used when determining sequence identity.

[0120] Probes and Primers

[0121] The nucleotide sequence of MSI-H markers are useful in the present invention for the generation of probes and primers designed for identifying the MSI-H marker nucleic acid sequence in a biological sample such as serum, colon cells or tissue. Nucleotide sequences useful as probes/primers may include all or a portion of SEQ ID Nos. 1-34, or a sequence complementary thereto, or sequences which hybridize under stringent conditions to all or a portion of SEQ ID No. 1-34. For instance, the present invention also provides a probe/primer comprising a substantially purified oligonucleotide, which oligonucleotide comprising a nucleotide sequence that hybridizes under stringent conditions to at least approximately 8, preferably about 12, preferably about 15, preferably about 25, more preferably about 40 consecutive nucleotides up to the full length of the sense or anti-sense sequence of SEQ ID Nos. 1-34, or a sequence complementary thereto, or a naturally occurring mutant thereof. For instance, primers based on the nucleic acid represented in one of SEQ ID Nos 1-34, or a sequence complementary thereto, can be used in a reaction to amplify a template nucleic acid (e.g., the MSI-H marker from which the primer sequence was derived) contained within an mRNA sample derived from a patient clinical sample.

[0122] Not only are probes based on the nucleic acid sequence encoding MSI-H marker sequences useful for detecting the MSI-H marker itself, but they can also provide a method for detecting mutations in wild-type MSI-H marker sequences in a patient. Nucleic acid probes which are complementary to a wild-type MSI-H marker sequence and can form mismatches with mutant genes are provided, allowing for detection by enzymatic or chemical cleavage or by shifts in electrophoretic mobility. Likewise, probes based on the subject sequences can be used to detect transcripts or genomic sequences encoding the same or homologous proteins, for use, for example, in prognostic or diagnostic assays. In preferred embodiments, the nucleic acid probe further comprises a label group attached thereto and able to be detected, e.g., the label group is selected from a radioisotope, a fluorescent compound, a chemiluminescent compound, a chromagenic compound, an enzyme, and enzyme co-factor.

[0123] Full-length cDNA molecules comprising the disclosed nucleic acids, useful for the generation of probes, primers, or antibodies to the MSI-H marker polypeptide sequences of SEQ ID Nos 35-68 may be obtained as follows. The nucleic acid sequence of MSI-H markers (SEQ ID Nos 1-34) or a portion thereof comprising at least approximately 8, preferably about 12, preferably about 15, preferably about 25, more preferably about 40 nucleotides up to the full length of the sequence of SEQ ID Nos. 1-34, or a sequence complementary thereto, may be used as a hybridization probe to detect hybridizing members of a cDNA library using probe design methods, cloning methods, and clone selection techniques as described in U.S. Pat. No. 5,654,173, “Secreted Proteins and Polynucleotides Encoding Them,” incorporated herein by reference. Libraries of cDNA may be made from selected tissues, such as normal or tumor tissue, or from tissues of a mammal treated with, for example, a pharmaceutical agent. Preferably, the tissue is the same as that used to generate the nucleic acids, as both the nucleic acid and the cDNA represent expressed genes. Alternatively, many cDNA libraries are available commercially. (Sambrook et al., Molecular Cloning: A Laboratory Manual, 2nd Ed. (Cold Spring Harbor Press, Cold Spring Harbor, N.Y. 1989). The choice of cell type for library construction may be made after the identity of the protein encoded by the nucleic acid- related gene is known. This will indicate which tissue and cell types are likely to express the related gene, thereby containing the mRNA for generating the cDNA.

[0124] Members of the library that are larger than the nucleic acid, and preferably that contain the whole sequence of the native message, may be obtained. To confirm that the entire cDNA has been obtained, RNA protection experiments may be performed as follows. Hybridization of a full-length cDNA to an mRNA may protect the RNA from RNase degradation. If the cDNA is not full length, then the portions of the mRNA that are not hybridized may be subject to RNase degradation. This may be assayed, as is known in the art, by changes in electrophoretic mobility on polyacrylamide gels, or by detection of released monoribonucleotides. Sambrook et al., Molecular Cloning: A Laboratory Manual, 2nd Ed. (Cold Spring Harbor Press, Cold Spring Harbor, N.Y. 1989). In order to obtain additional sequences 5′ to the end of a partial cDNA, 5′ RACE (PCR Protocols: A Guide to Methods and Applications (Academic Press, Inc. 1990)) may be performed.

[0125] Genomic DNA (e.g., MSI-H marker genomic DNA) may be isolated using nucleic acids in a manner similar to the isolation of full-length cDNAs. Briefly, the nucleic acids, or portions thereof, may be used as probes to libraries of genomic DNA. Preferably, the library is obtained from the cell type that was used to generate the nucleic acids. Most preferably, the genomic DNA is obtained from the biological material described herein in the Example. Such libraries may be in vectors suitable for carrying large segments of a genome, such as P1 or YAC, as described in detail in Sambrook et al., pages 9.4-9.30. In addition, genomic sequences can be isolated from human BAC libraries, which are commercially available from Research Genetics, Inc., Huntville, Ala., USA, for example. In order to obtain additional 5′ or 3′ sequences, chromosome walking may be performed, as described in Sambrook et al., such that adjacent and overlapping fragments of genomic DNA are isolated. These may be mapped and pieced together, as is known in the art, using restriction digestion enzymes and DNA ligase.

[0126] Using the nucleic acids of the invention, corresponding full length genes can be isolated using both classical and PCR methods to construct and probe cDNA libraries. Using either method, Northern blots, preferably, may be performed on a number of cell types to determine which cell lines express the gene of interest at the highest rate.

[0127] Classical methods of constructing cDNA libraries in Sambrook et al., supra. With these methods, cDNA can be produced from mRNA and inserted into viral or expression vectors. Typically, libraries of mRNA comprising poly(A) tails can be produced with poly(T) primers. Similarly, cDNA libraries can be produced using the instant MSI sequences or portions thereof as primers.

[0128] PCR methods may be used to amplify the members of a cDNA library that comprise the desired insert. In this case, the desired insert may contain sequence from the full length cDNA that corresponds to the sequence encoding a MSI polypeptide marker of the invention. Such PCR methods include gene trapping and RACE methods.

[0129] Gene trapping may entail inserting a member of a cDNA library into a vector. The vector then may be denatured to produce single stranded molecules. Next, a substrate-bound probe, such a biotinylated oligo, may be used to trap cDNA inserts of interest. Biotinylated probes can be linked to an avidin-bound solid substrate. PCR methods can be used to amplify the trapped cDNA. To trap sequences corresponding to the full length genes, the labeled probe sequence may be based on the nucleic acid of SEQ ID Nos. 1-34, or a sequence complementary thereto. Random primers or primers specific to the library vector can be used to amplify the trapped cDNA. Such gene trapping techniques are described in Gruber et al., PCT WO 95/04745 and Gruber et al., U.S. Pat. No. 5,500,356. Kits are commercially available to perform gene trapping experiments from, for example, Life Technologies, Gaithersburg, Md., USA.

[0130] “Rapid amplification of cDNA ends,” or RACE, is a PCR method of amplifying cDNAs from a number of different RNAs. The cDNAs may be ligated to an oligonucleotide linker and amplified by PCR using two primers. One primer may be based on sequence from the instant nucleic acids, for which full length sequence is desired, and a second primer may comprise a sequence that hybridizes to the oligonucleotide linker to amplify the cDNA. A description of this method is reported in PCT Pub. No. WO 97/19110.

[0131] In preferred embodiments of RACE, a common primer may be designed to anneal to an arbitrary adaptor sequence ligated to cDNA ends (Apte and Siebert, Biotechniques 15:890-893, 1993; Edwards et al., Nuc. Acids Res. 19:5227-5232, 1991). When a single gene-specific RACE primer is paired with the common primer, preferential amplification of sequences between the single gene specific primer and the common primer occurs. Commercial cDNA pools modified for use in RACE are available.

[0132] Once the full-length cDNA or gene is obtained, DNA encoding variants can be prepared by site-directed mutagenesis, described in detail in Sambrook 15.3-15.63. The choice of codon or nucleotide to be replaced can be based on the disclosure herein on optional changes in amino acids to achieve altered protein structure and/or function.

[0133] As an alternative method to obtaining DNA or RNA from a biological material, such as colon tissue, nucleic acid comprising nucleotides having the sequence of one or more nucleic acids of the invention can be synthesized. Thus, the invention encompasses nucleic acid molecules ranging in length from about 8 nucleotides (corresponding to at least 12 contiguous nucleotides which hybridize under stringent conditions to or are at least 80% identical to the nucleic acid sequence of one of SEQ ID Nos. 1-34, or a sequence complementary thereto) up to a maximum length suitable for one or more biological manipulations, including replication and expression, of the nucleic acid molecule. The invention includes but is not limited to (a) nucleic acid having the size of the full gene represented by each of the MSI-H marker polynucleotide sequences of the invention, or a sequence complementary thereto; (b) the nucleic acid of (a) also comprising at least one additional gene, operably linked to permit expression of a fusion protein; (c) an expression vector comprising (a) or (b); (d) a plasmid comprising (a) or (b); and (e) a recombinant viral particle comprising (a) or (b).

[0134] The sequence of a nucleic acid of the present invention is not limited and can be any sequence of A, T, G, and/or C (for DNA) and A, U, G, and/or C (for RNA) or modified bases thereof, including inosine and pseudouridine. The choice of sequence will depend on the desired function and can be dictated by coding regions desired, the intron-like regions desired, and the regulatory regions desired.

[0135] Probe Preparation

[0136] Prior to hybridization of a probe nucleic acid to a patient sample, the nucleic acid samples must be prepared to facilitate subsequent detection of hybridization. The nucleic acid samples obtained from an individual to be screened for colorectal cancer or MSI are capable of being bound by a nucleic acid probe of complementary sequence through one or more types of chemical bonds, usually through complementary base pairing, usually through hydrogen bond formation.

[0137] Probes useful in the invention for hybridizing to and thus identifying the presence of one or more of the MSI-H marker sequences of SEQ ID Nos 1-34, and optionally, at least one additional colorectal cancer associated marker may be designed to hybridize to a polynucleotide molecule derived from an mRNA transcript coding for one or more of the MSI-H marker sequences or optionally, at least one additional colorectal cancer associated marker. As used herein, a “polynucleotide derived from an mRNA transcript” refers to a polynucleotide for which synthesis of the mRNA transcript or a subsequence thereof has ultimately served as a template. Thus, a cDNA reverse transcribed from an mRNA, an RNA transcribed from that cDNA, a DNA amplified from the cDNA, an RNA transcribed from the amplified DNA, etc., are all derived from the mRNA transcript and detection of such derived products is indicative of the presence and/or abundance of the original transcript in a sample. Thus, suitable target nucleic acid samples include, but are not limited to, mRNA transcripts of a gene or genes (i.e., MSI-H marker or a colorectal cancer associated marker), cDNA reverse transcribed from the mRNA, cRNA transcribed from the cDNA, DNA amplified from a gene or genes, RNA transcribed from amplified DNA, and the like. The polynucleotide probes used herein are preferably designed to hybridize to one or more of the MSI-H marker sequences, or optionally to a sequence encoding at least one other colorectal cancer associated marker.

[0138] Nucleic acid probes may be generated using techniques which are well known to those of skill in the art (see, e.g., Sambrook et al., Molecular Cloning: A Laboratory Manual (2nd ed.), Vols. 1-3, Cold Spring Harbor Laboratory, (1989), or Current Protocols in Molecular Biology, F. Ausubel et al., ed. Greene Publishing and Wiley-Interscience, New York (1987).

[0139] In order to measure the hybridization of a probe nucleic acid to a target sequence in a sample, the probe nucleic acid is preferably labeled with a detectable label. Any analytically detectable marker that is attached to or incorporated into a molecule may be used in the invention. An analytically detectable marker refers to any molecule, moiety or atom which is analytically detected and quantified.

[0140] Detectable labels suitable for use in the present invention include any composition detectable by spectroscopic, photochemical, biochemical, immunochemical, electrical, optical or chemical means. Useful labels in the present invention include biotin for staining with labeled streptavidin conjugate, magnetic beads (e.g., Dynabeads™), fluorescent dyes (e.g., fluorescein, texas red, rhodamine, green fluorescent protein, and the like), radiolabels (e.g., ³H, ¹²⁵I, 35S, ¹⁴C, or ³²P), enzymes (e.g., horse radish peroxidase, alkaline phosphatase and others commonly used in an ELISA), and colorimetric labels such as colloidal gold or colored glass or plastic (e.g., polystyrene, polypropylene, latex, etc.) beads. Patents teaching the use of such labels include U.S. Pat. Nos. 3,817,837; 3,850,752; 3,939,350; 3,996,345; 4,277,437; 4,275,149; and 4,366,241.

[0141] Means of detecting such labels are well known to those of skill in the art. Thus, for example, radiolabels may be detected using photographic film or scintillation counters, fluorescent markers may be detected using a photodetector to detect emitted light. Enzymatic labels are typically detected by providing the enzyme with a substrate and detecting the reaction product produced by the action of the enzyme on the substrate, and colorimetric labels are detected by simply visualizing the colored label.

[0142] The labels may be incorporated into a nucleic acid probe by any of a number of means well known to those of skill in the art. However, in a preferred embodiment, the label is simultaneously incorporated into the probe during an amplification step in the preparation of the probe polynucleotides. Thus, for example, polymerase chain reaction (PCR), or other amplification reaction, with labeled primers or labeled nucleotides will provide a labeled amplification product, and thus a labeled probe.

[0143] Alternatively, a label may be added directly to the probe. Means of attaching labels to polynucleotides are well known to those of skill in the art and include, for example nick translation or end-labeling (e.g. with a labeled RNA) and subsequent attachment (ligation) of a polynucleotide linker joining the sample polynucleotide to a label (e.g., a fluorophore).

[0144] In a preferred embodiment, the fluorescent modifications are by cyanine dyes e.g. Cy-3/Cy-5 dUTP, Cy-3/Cy-5 dCTP (Amersham Pharmacia) or alexa dyes (Khan, J., Simon, R., Bittner, M., Chen, Y., Leighton, S. B., Pohida, T., Smith, P. D., Jiang, Y., Gooden, G. C., Trent, J. M. & Meltzer, P. S. (1998) Cancer Res. 58, 50095013.).

[0145] In a preferred embodiment, a probe nucleic acid which is capable of hybridizing to one or more of the MSI-H marker sequences described herein and a probe nucleic acid which is capable of hybridizing to a nucleic acid sequence encoding at least one additional colorectal cancer associated marker, are co-hybridized to a test sample (e.g., a serum sample). In this embodiment, the two probe samples used for comparison are labeled with different fluorescent dyes which produce distinguishable detection signals, for example, probes hybridizable with a MSI nucleic acid marker sequence are labeled with Cy5 and probes hybridizable with another colorectal cancer associated marker are labeled with Cy3. The differently labeled target samples are hybridized to the same microarray simultaneously.

[0146] In a preferred embodiment, a control probe may be co-hybridized to a sample along with a probe for a MSI-H marker sequence and/or a probe for an additional colorectal cancer associated marker, wherein the control probe is capable of hybridizing to a nucleic acid sequence known to be found in the clinical sample, for example, where the clinical sample is a serum sample, a control sequence may be a sequence encoding serum albumin, or fibrinogen.

[0147] Antibodies

[0148] The invention provides a method for MSI-H detection (and subsequent stratification of patients based on MSI status for prognosis, treatment, and/or monitoring) comprising the step of detecting the presence and overexpression of polypeptide molecules encoded by one or more of the MSI-H marker sequences of SEQ ID Nos 1-34 (and optionally, at least one additional colorectal cancer associated marker) in a biological sample from an individual. In one embodiment, the presence of one or more MSI-H markers , or other marker, in such a sample is detected using a polypeptide ligand which is preferably detectably labeled, and is capable of binding to the MSI-H marker polypeptide, and if present, the other marker, in the sample. In a preferred embodiment, the polypeptide ligand is an antibody. Antibodies of the invention include, but are not limited to, polyclonal, monoclonal, multispecific, human, humanized, or chimeric antibodies, single chain antibodies, Fab fragments, Fv fragments F(ab′) fragments, fragments produced by a Fab expression library, anti-iodiotypic antibodies, or other epitope binding polypeptide. Preferably, an antibody, useful in the present invention for the detection of one or more MSI-H marker polypeptides(and optionally at least one additional colorectal cancer associated marker), is a human antibody or fragment thereof, including scFv, Fab, Fab′, F(ab′), Fd, single chain antibody, of Fv. Antibodies, useful in the invention may include a complete heavy or light chain constant region, or a portion thereof, or an absence thereof. An antibody, useful in the invention, may be obtained from an art recognized host, such as rabbit, mouse, rat, donkey, sheep, goat, guinea pig, camel, horse, or chicken. In one embodiment, an antibody, useful in the invention can be a humanized antibody, in which amino acids have been replaced in the non-antigen binding regions in order to more closely resemble a human antibody, while still retaining the original binding ability. Methods for making humanized antibodies are described in Teng et al., 1983, Proc. Natl. Acad. Sci. USA 80: 7308-7312; Kozbor et al., 1983, Immunology Today 4: 7279; Olsson et al., 1982, Meth. Enzymol. 92: 3-16; WO 92/06193; EP 0239400.

[0149] Antibodies of the present invention may be monospecific, dispecific, trispecific, or of greater multispecificity. As such, one or more MSI polypeptide markers and optionally an additional colorectal cancer associated marker useful for the detection of colorectal cancer and/or MSI-H, or optionally, two or more MSI polypeptide markers may be detected with separate antibodies, or may be detected with the same antibody. Alternatively, a multispecific antibody may exhibit different specificities for different epitopes on the same protein. While specificity of an antibody useful in the present invention to either an MSI-H marker or one or more additional colorectal cancer associated markers is preferred, antibodies that bind polypeptides with at least 95%, 90%, 85%, 75%, 65%, 55%, and at least 50% identity to a polypeptide useful in the present invention for the detection of colorectal cancer are also included in the present invention. Also encompassed in the present invention are antibodies which bind to polypeptide molecules which are encoded by one or more nucleic acid sequences which are complementary to, or hybridize to the sequences of SEQ ID Nos. 1-34, or one or more sequences which are complementary to, or hybridize to a nucleic acid sequence which encodes an additional colorectal cancer associated marker as described herein.

[0150] Antibodies of the present invention which are useful for the detection of colorectal cancer may further act as agonists or antagonists of the activity of the polypeptide molecules to which they bind, and may thus be useful as therapeutic molecules for the treatment or prevention of colorectal cancer.

[0151] An important, but not limiting, role of an antibody of the present invention is to provide for the purification, or detection of one or more MSI polypeptide markers or other colorectal cancer associated markers in a patient sample, including both in vitro and in vivo detection methods. Antibodies useful for the detection of colorectal cancer as described herein do not have to be used alone, and can be fused to other polypeptides, including a heterologous polypeptide at the N- or C-terminus of the antibody polypeptide sequence. For example, an antibody useful in the present invention may be fused with a detectable label to facilitate detection of the antibody when bound to a target polypeptide. Methods for detectably labeling an antibody polypeptide are known to those of skill in the art.

[0152] For the production of antibodies useful in the present invention, various hosts including goats, rabbits, rats, mice, etc., may be immunized by injection with the protein products (or any portion, fragment, or oligonucleotide thereof which retains immunogenic properties) of the candidate genes of the invention. Depending on the host species, various adjuvants may be used to increase the immunological response. Such adjuvants include but are not limited to Freund's, mineral gels such as aluminum hydroxide, and surface active substances such as lysolecithin, pluronic polyols, polyanions, peptides, oil emulsions, keyhole limpet hemocyanin, and dinitrophenol. BCG (bacilli Calmette-Guerin) and Corynebacterium parvum are potentially useful human adjuvants.

[0153] Polyclonal antisera or monoclonal antibodies can be made using methods known in the art. A mammal such as a mouse, hamster, or rabbit, can be immunized with an immunogenic form of a MSI-H marker polypeptide, fragment, modified form thereof, or variant form thereof. Alternatively, an animal may be immunized with an immunogenic form of one or more additional colorectal cancer associated marker polypeptides. Techniques for conferring immunogenicity on such molecules include conjugation to carriers or other techniques well known in the art. For example, the immunogenic molecule can be administered in the presence of adjuvant as described above. Immunization can be monitored by detection of antibody titers in plasma or serum. Standard immunoassay procedures can be used with the immunogen as antigen to assess the levels and the specificity of antibodies. Following immunization, antisera can be obtained and, if desired, polyclonal antibodies isolated from the sera.

[0154] To produce monoclonal antibodies, antibody producing cells (lymphocytes) can be harvested from an immunized animal and fused with myeloma cells by standard somatic cell fusion procedures thus immortalizing these cells and yielding hybridoma cells. Such techniques are well known in the art (see, e.g., Kohler and Milstein, 1975, Nature 256: 495-497; Kozbor et al., 1983, Immunol. Today 4: 72, Cole et al., 1985, In Monoclonal Antibodies in Cancer Therapy, Allen R. Bliss, Inc., pages 77-96). Additionally, techniques described for the production of single-chain antibodies (U.S. Pat. No. 4,946,778) can be adapted to produce antibodies according to the invention.

[0155] Antibody fragments which can specifically bind to a polypeptide of the invention, fragments thereof, modified forms thereof, and variants thereof, also may be generated by known techniques. For example, such fragments include, but are not limited to, F(ab′)₂ fragments which can be produced by pepsin digestion of the antibody molecule and the Fab fragments which can be generated by reducing the disulfide bridges of the F(ab′)₂ fragments. VH regions and FV regions can be expressed in bacteria using phage expression libraries (e.g., Ward et al., 1989, Nature 341: 544-546; Huse et al., 1989, Science 246: 1275-1281; McCafferty et al., 1990, Nature 348: 552-554).

[0156] Chimeric antibodies, i.e., antibody molecules that combine a non-human animal variable region and a human constant region also are within the scope of the invention. Chimeric antibody molecules include, for example, the antigen binding domain from an antibody of a mouse, rat, or other species, with human constant regions. Standard methods may be used to make chimeric antibodies containing the immunoglobulin variable region which recognizes the gene product of MSI-H marker antigens of the invention (see, e.g., Morrison et al., 1985, Proc. Natl. Acad. Sci. USA 81: 6851; Takeda et al., 1985, Nature 314: 452; U.S. Pat. No. 4,816,567; U.S. Pat. No. 4,816,397). Vectors and Host Cells

[0157] The present invention further provides vectors and plasmids useful for directing the expression of one or more of the MSI-H markers of the invention or other colorectal cancer associated markers, and further provides host cells which express the vectors and plasmids provided herein. Nucleic acid sequences useful for the expression from a vector or plasmid as described below include, but are not limited to any nucleic acid or gene sequence identified as being differentially regulated by the methods described above, and further include therapeutic nucleic acid molecules, such as antisense molecules. The host cell may be any prokaryotic or eukaryotic cell. Ligating the polynucleotide sequence into a gene construct, such as an expression vector, and transforming or transfecting into hosts, either eukaryotic (yeast, avian, insect or mammalian) or prokaryotic (bacterial cells), are standard procedures well known in the art.

[0158] Vectors

[0159] There is a wide array of vectors known and available in the art that are useful for the expression of differentially expressed nucleic acid molecules according to the invention. The selection of a particular vector clearly depends upon the intended use of the polypeptide encoded by the differentially expressed nucleic acid. For example, the selected vector must be capable of driving expression of the polypeptide in the desired cell type, whether that cell type be prokaryotic or eukaryotic. Many vectors comprise sequences allowing both prokaryotic vector replication and eukaryotic expression of operably linked gene sequences.

[0160] Vectors useful according to the invention may be autonomously replicating, that is, the vector, for example, a plasmid, exists extrachromosomally and its replication is not necessarily directly linked to the replication of the host cell's genome. Alternatively, the replication of the vector may be linked to the replication of the host's chromosomal DNA, for example, the vector may be integrated into the chromosome of the host cell as achieved by retroviral vectors.

[0161] Vectors useful according to the invention preferably comprise sequences operably linked to the sequence of interest (e.g., an MSI-H marker sequence) that permit the transcription and translation of the sequence. Sequences that permit the transcription of the linked sequence of interest include a promoter and optionally also include an enhancer element or elements permitting the strong expression of the linked sequences. The term “transcriptional regulatory sequences” refers to the combination of a promoter and any additional sequences conferring desired expression characteristics (e.g., high level expression, inducible expression, tissue- or cell-type-specific expression) on an operably linked nucleic acid sequence.

[0162] The selected promoter may be any DNA sequence that exhibits transcriptional activity in the selected host cell, and may be derived from a gene normally expressed in the host cell or from a gene normally expressed in other cells or organisms. Examples of promoters include, but are not limited to the following: A) prokaryotic promoters—E. coli lac, tac, or trp promoters, lambda phage PR or PL promoters, bacteriophage T7, T3, Sp6 promoters, B. subtilis alkaline protease promoter, and the B. stearothermophilus maltogenic amylase promoter, etc.; B) eukaryotic promoters - yeast promoters, such as GAL1, GAL4 and other glycolytic gene promoters (see for example, Hitzeman et al., 1980, J. Biol. Chem. 255: 12073-12080; Alber & Kawasaki, 1982, J. Mol. Appl. Gen. 1: 419-434), LEU2 promoter (Martinez-Garcia et al., 1989, Mol Gen Genet. 217: 464-470), alcohol dehydrogenase gene promoters (Young et al., 1982, in Genetic Engineering of Microorganisms for Chemicals, Hollaender et al., eds., Plenum Press, NY), or the TPI1 promoter (U.S. Pat. No. 4,599,311); insect promoters, such as the polyhedrin promoter (U.S. Pat. No. 4,745,051; Vasuvedan et al., 1992, FEBS Lett. 311: 7-11), the P10 promoter (Vlak et al., 1988, J. Gen. Virol. 69: 765-776), the Autographa californica polyhedrosis virus basic protein promoter (EP 397485), the baculovirus immediate-early gene promoter gene 1 promoter (U.S. Pat. Nos. 5,155,037 and 5,162,222), the baculovirus 39K delayed-early gene promoter (also U.S. Pat. Nos. 5,155,037 and 5,162,222) and the OpMNPV immediate early promoter 2; mammalian promoters—the SV40 promoter (Subramani et al., 1981, Mol. Cell. Biol. 1: 854-864), metallothionein promoter (MT-1; Palmiter et al., 1983, Science 222: 809-814), adenovirus 2 major late promoter (Yu et al., 1984, Nucl. Acids Res. 12: 9309-21), cytomegalovirus (CMV) or other viral promoter (Tong et al., 1998, Anticancer Res. 18: 719-725), or even the endogenous promoter of a gene of interest in a particular cell type.

[0163] A selected promoter may also be linked to sequences rendering it inducible or tissue- specific. For example, the addition of a tissue-specific enhancer element upstream of a selected promoter may render the promoter more active in a given tissue or cell type. Alternatively, or in addition, inducible expression may be achieved by linking the promoter to any of a number of sequence elements permitting induction by, for example, thermal changes (temperature sensitive), chemical treatment (for example, metal ion- or IPTG-inducible), or the addition of an antibiotic inducing agent (for example, tetracycline).

[0164] Regulatable expression is achieved using, for example, expression systems that are drug inducible (e.g., tetracycline, rapamycin or hormone-inducible). Drug-regulatable promoters that are particularly well suited for use in mammalian cells include the tetracycline regulatable promoters, and glucocorticoid steroid-, sex hormone steroid-, ecdysone-, lipopolysaccharide (LPS)- and isopropylthiogalactoside (IPTG)-regulatable promoters. A regulatable expression system for use in mammalian cells should ideally, but not necessarily, involve a transcriptional regulator that binds (or fails to bind) non-mammalian DNA motifs in response to a regulatory agent, and a regulatory sequence that is responsive only to this transcriptional regulator.

[0165] Tissue-specific promoters may also be used to advantage in differentially expressed sequence-encoding constructs of the invention. A wide variety of tissue-specific promoters are known. As used herein, the term “tissue-specific” means that a given promoter is transcriptionally active (i.e., directs the expression of linked sequences sufficient to permit detection of the polypeptide product of the promoter) in less than all cells or tissues of an organism. A tissue specific promoter is preferably active in only one cell type, but may, for example, be active in a particular class or lineage of cell types (e.g., hematopoietic cells). A tissue specific promoter useful according to the invention comprises those sequences necessary and sufficient for the expression of an operably linked nucleic acid sequence in a manner or pattern that is essentially the same as the manner or pattern of expression of the gene linked to that promoter in nature. The following is a non-exclusive list of tissue specific promoters and literature references containing the necessary sequences to achieve expression characteristic of those promoters in their respective tissues; the entire content of each of these literature references is incorporated herein by reference. Examples of tissue specific promoters useful in the present invention are as follows:

[0166] Bowman et al., 1995 Proc. Natl. Acad. Sci. USA 92, 12115-12119 describe a brain- specific transferrin promoter; the synapsin I promoter is neuron specific (Schoch et al., 1996 J. Biol. Chem. 271, 3317-3323); the nestin promoter is post-mitotic neuron specific (Uetsuki et al., 1996 J. Biol. Chem. 271, 918-924); the neurofilament light promoter is neuron specific (Charron et al., 1995 J. Biol. Chem. 270, 30604-30610); the acetylcholine receptor promoter is neuron specific (Wood et al., 1995 J. Biol. Chem. 270, 30933-30940); and the potassium channel promoter is high-frequency firing neuron specific (Gan et al., 1996 J. Biol. Chem 271, 5859-5865). Any tissue specific transcriptional regulatory sequence known in the art may be used to advantage with a vector encoding a differentially expressed nucleic acid sequence obtained from an animal subjected to pain.

[0167] In addition to promoter/enhancer elements, vectors useful according to the invention may further comprise a suitable terminator. Such terminators include, for example, the human growth hormone terminator (Palmiter et al., 1983, supra), or, for yeast or fungal hosts, the TPI1 (Alber & Kawasaki, 1982, supra) or ADH3 terminator (McKnight et al., 1985, EMBO J. 4: 2093-2099).

[0168] Vectors useful according to the invention may also comprise polyadenylation sequences (e.g., the SV40 or Ad5E1b poly(A) sequence), and translational enhancer sequences (e.g., those from Adenovirus VA RNAs). Further, a vector useful according to the invention may encode a signal sequence directing the recombinant polypeptide to a particular cellular compartment or, alternatively, may encode a signal directing secretion of the recombinant polypeptide.

[0169] a. Plasmid Vectors.

[0170] Any plasmid vector that allows expression of a coding sequence of interest (e.g., the coding sequence of a MSI-H marker peptide sequence) in a selected host cell type is acceptable for use according to the invention. A plasmid vector useful in the invention may have any or all of the above-noted characteristics of vectors useful according to the invention. Plasmid vectors useful according to the invention include, but are not limited to the following examples: Bacterial—pQE70, pQE60, pQE-9 (Qiagen) pBs, phagescript, psiX174, pBluescript SK, pBsKS, pNH8a, pNH16a, pNH18a, pNH46a (Stratagene); pTrc99A, pKK223-3, pKK233-3, pDR540, and pRIT5 (Pharmacia); Eukaryotic—pWLneo, pSV2cat, pOG44, pXT1, pSG (Stratagene) pSVK3, pBPV, pMSG, and pSVL (Pharmacia). However, any other plasmid or vector may be used as long as it is replicable and viable in the host.

[0171] b. Bacteriophage Vectors.

[0172] There are a number of well known bacteriophage-derived vectors useful according to the invention. Foremost among these are the lambda-based vectors, such as Lambda Zap II or Lambda-Zap Express vectors (Stratagene) that allow inducible expression of the polypeptide encoded by the insert. Others include filamentous bacteriophage such as the M13-based family of vectors.

[0173] c. Viral Vectors.

[0174] A number of different viral vectors are useful according to the invention, and any viral vector that permits the introduction and expression of one or more of the polynucleotides of the invention in cells is acceptable for use in the methods of the invention. Viral vectors that can be used to deliver foreign nucleic acid into cells include but are not limited to retroviral vectors, adenoviral vectors, adeno-associated viral vectors, herpesviral vectors, and Semliki forest viral (alphaviral) vectors. Defective retroviruses are well characterized for use in gene transfer (for a review see Miller, A. D. (1990) Blood 76:271). Protocols for producing recombinant retroviruses and for infecting cells in vitro or in vivo with such viruses can be found in Current Protocols in Molecular Biology, Ausubel, F. M. et al. (eds.) Greene Publishing Associates, (1989), Sections 9.10-9.14, and other standard laboratory manuals.

[0175] In addition to retroviral vectors, Adenovirus can be manipulated such that it encodes and expresses a gene product of interest but is inactivated in terms of its ability to replicate in a normal lytic viral life cycle (see for example Berkner et al., 1988, BioTechniques 6:616; Rosenfeld et al., 1991, Science 252:431-434; and Rosenfeld et al., 1992, Cell 68:143-155). Suitable adenoviral vectors derived from the adenovirus strain Ad type 5 d1324 or other strains of adenovirus (e.g., Ad2, Ad3, Ad7 etc.) are well known to those skilled in the art. Adeno-associated virus (AAV) is a naturally occurring defective virus that requires another virus, such as an adenovirus or a herpes virus, as a helper virus for efficient replication and a productive life cycle. (For a review see Muzyczka et al., 1992, Curr. Topics in Micro. and Immunol. 158:97-129). An AAV vector such as that described in Traschin et al. (1985, Mol. Cell. Biol. 5:3251-3260) can be used to introduce nucleic acid into cells. A variety of nucleic acids have been introduced into different cell types using AAV vectors (see, for example, Hermonat et al., 1984, Proc. Natl. Acad. Sci. USA 81: 6466-6470; and Traschin et al., 1985, Mol. Cell. Biol. 4: 2072-2081).

[0176] Host Cells

[0177] Any cell into which a recombinant vector carrying a gene of interest may be introduced and wherein the vector is permitted to drive the expression of the peptide encoded by the differentially expressed sequence is useful according to the invention. Any cell in which a differentially expressed molecule of the invention may be expressed and preferably detected is a suitable host, wherein the host cell is preferably a mammalian cell and more preferably a human cell. Vectors suitable for the introduction of nucleic acid sequences to host cells from a variety of different organisms, both prokaryotic and eukaryotic, are described herein above or known to those skilled in the art.

[0178] Host cells may be prokaryotic, such as any of a number of bacterial strains, or may be eukaryotic, such as yeast or other fungal cells, insect or amphibian cells, or mammalian cells including, for example, rodent, simian or human cells. Cells may be primary cultured cells, for example, primary human fibroblasts or keratinocytes, or may be an established cell line, such as NIH3T3, 293T or CHO cells. Further, mammalian cells useful in the present invention may be phenotypically normal or oncogenically transformed. It is assumed that one skilled in the art can readily establish and maintain a chosen host cell type in culture.

[0179] Introduction of Vectors to Host Cells

[0180] Vectors useful in the present invention may be introduced to selected host cells by any of a number of suitable methods known to those skilled in the art. For example, vector constructs may be introduced to appropriate bacterial cells by infection, in the case of E. coli bacteriophage vector particles such as lambda or M13, or by any of a number of transformation methods for plasmid vectors or for bacteriophage DNA. For example, standard calcium-chloride-mediated bacterial transformation is still commonly used to introduce naked DNA to bacteria (Sambrook et al., 1989, Molecular Cloning, A Laboratory Manual, Cold Spring Harbor Laboratory Press, Cold Spring Harbor, N.Y.), but electroporation may also be used (Ausubel et al., 1988, Current Protocols in Molecular Biology, (John Wiley & Sons, Inc., NY, N.Y.)).

[0181] For the introduction of vector constructs to yeast or other fungal cells, chemical transformation methods are generally used (e.g. as described by Rose et al., 1990, Methods in Yeast Genetics, Cold Spring Harbor Laboratory Press, Cold Spring Harbor, N.Y.). For transformation of S. cerevisiae, for example, the cells are treated with lithium acetate to achieve transformation efficiencies of approximately 104 colony-forming units (transformed cells)/μg of DNA. Transformed cells are then isolated on selective media appropriate to the selectable marker used. Alternatively, or in addition, plates or filters lifted from plates may be scanned for GFP fluorescence to identify transformed clones.

[0182] For the introduction of vectors comprising a sequence of interest to mammalian cells, the method used will depend upon the form of the vector. Plasmid vectors may be introduced by any of a number of transfection methods, including, for example, lipid-mediated transfection (“lipofection”), DEAE-dextran-mediated transfection, electroporation or calcium phosphate precipitation. These methods are detailed, for example, in Current Protocols in Molecular Biology (Ausubel et al., 1988, John Wiley & Sons, Inc., NY, N.Y.).

[0183] Lipofection reagents and methods suitable for transient transfection of a wide variety of transformed and non-transformed or primary cells are widely available, making lipofection an attractive method of introducing constructs to eukaryotic, and particularly mammalian cells in culture. For example, LipofectAMINE™ (Life Technologies) or LipoTaxi™ (Stratagene) kits are available. Other companies offering reagents and methods for lipofection include Bio-Rad Laboratories, CLONTECH, Glen Research, InVitrogen, JBL Scientific, MBI Fermentas, PanVera, Promega, Quantum Biotechnologies, Sigma-Aldrich, and Wako Chemicals USA.

[0184] Following transfection with a vector of the invention, eukaryotic (e.g., human) cells successfully incorporating the construct (intra- or extrachromosomally) may be selected, as noted above, by either treatment of the transfected population with a selection agent, such as an antibiotic whose resistance gene is encoded by the vector, or by direct screening using, for example, FACS of the cell population or fluorescence scanning of adherent cultures. Frequently, both types of screening may be used, wherein a negative selection is used to enrich for cells taking up the construct and FACS or fluorescence scanning is used to further enrich for cells expressing differentially expressed polynucleotides or to identify specific clones of cells, respectively. For example, a negative selection with the neomycin analog G418 (Life Technologies, Inc.) may be used to identify cells that have received the vector, and fluorescence scanning may be used to identify those cells or clones of cells that express the vector construct to the greatest extent.

Detection Assays

[0185] The present invention provides method for detecting colorectal cancer, or alternatively, determining whether a subject is at risk for developing colorectal cancer, or alternatively, determining the presence of MSI-H in a tumor sample, by detecting the overexpression of the disclosed MSI-H markers (and optionally, one or more nucleic acid sequences encoding an additional colorectal cancer associated marker; alternatively, MSI-H polypeptide markers and optionally, at least one additional colorectal cancer associated marker) for the disease or condition encoded thereby.

[0186] In clinical applications, human biological samples, can be screened for the presence, absence and/or overexpression of MSI-H markers and/or other colorectal cancer associated markers identified herein. Such samples may comprise tissue samples, whole cells, cell lysates, or isolated nucleic acids, including, for example, needle biopsy cores, surgical resection samples, lymph node tissue, or serum. Methods for obtaining any or all of the above biological samples from an individual are well known to those of skill in the art.

[0187] Screening for nucleic acid molecules

[0188] In one embodiment, the detection method of the present invention comprises determining whether a biological sample from an individual contains DNA and/or mRNA of a MSI-H marker, and preferably, whether a particular MSI-H marker sequence is overexpressed by at least 2-fold. Techniques for determining the presence of a nucleic acid molecule of interest include, but are not limited to, Northern blot analysis, reverse transcription- polymerase chain reaction (RT-PCR), in situ hybridization, PCR, and quantitative amplification.

[0189] Prior to detection of target nucleic acid molecules in a clinical sample, it is preferred to first isolate the nucleic acid (preferably RNA, preferably mRNA) from the sample to facilitate detection of the target sequence. Methods for isolation of RNA from a biological sample are well known in the art, and commercial kits are available for RNA extraction from a biological sample as described herein (e.g., RNeasy kit, QIAGEN, Valencia, Calif.).

[0190] Alternatively, total RNA may be extracted from a clinical sample according to the present invention using a commercially available RNA isolation reagent such as Trizol (Invitrogen, Carlsbad, Calif.), following the manufacturers instructions. Purity and integrity of RNA is assessed by absorbance at 260/280 nm and separation of RNA samples on a 1% agarose gel followed by inspection under ultraviolet light.

[0191] In one embodiment, following RNA isolation, the RNA may be reverse transcribed to provide a cDNA sample according to methods well known to those of skill in the art (see, e.g., Ausubel et al. (1995), Short Protocols in Molecular Biology, 3^{rd} Ed. John Wiley and Sons, Inc.)

[0192] Accordingly, in one aspect, the invention provides probes and primers that specifically hybridize to one or more of the MSI-H marker nucleic acid sequences disclosed herein, or which can hybridize to a nucleic acid molecule encoding an additional colorectal cancer associated marker as described herein. Accordingly, the nucleic acid probes comprise a region of a nucleic acid sequence of SEQ ID Nos 1-34 sufficient to hybridize with a nucleic acid substantially complementary to the sequence of SEQ ID Nos 1-34. Preferred nucleic acid molecules for use as probes/primers can further comprise a region of nucleic acid sequence substantially complementary to the sequence of SEQ ID Nos. 1-34 sufficient to hybridize with the sequence of SEQ ID Nos. 1-34. In addition, nucleic acid sequences useful as probes/primers comprise a nucleotide sequence at least about 8 nucleotides in length, at least about 12 nucleotides in length, preferably at least about 15 nucleotides, more preferably about 25 nucleotides, and most preferably at least 40 nucleotides, and up to all or nearly all of the coding sequence which is complementary to a portion of the coding sequence of a marker nucleic acid sequence, which nucleic acid sequence is represented by SEQ ID Nos: 1-34, or a sequence complementary thereto.

[0193] In one embodiment, the method comprises using a nucleic acid probe to determine the presence and overexpression of one or more MSI-H marker nucleic acid molecules in a clinical sample (such as a serum sample or a nucleic acid sample extracted therefrom). Specifically, the method comprises:
[0194] 1. Providing a nucleic acid probe comprising a nucleotide sequence at least about 8 nucleotides in length, at least about 12 nucleotides in length, preferably at least about 15 nucleotides, more preferably about 25 nucleotides, and most preferably at least about 40 nucleotides, and up to all or nearly all of the coding sequence which is complementary to a portion of the coding sequence of a nucleic acid sequence represented by SEQ ID Nos: 1-34, or a sequence complementary thereto;
[0195] 2. Obtaining a biological sample from a patient potentially comprising a MSI-H marker nucleic acid sequence;
[0196] 3. Providing a second clinical sample from an individual known to not have colorectal cancer and/or MSI;
[0197] 4. Contacting the nucleic acid probe under stringent conditions with RNA of each of said first and second biological samples (e.g., in a Northern blot or in situ hybridization assay); and
[0198] 5. Comparing (a) the amount of hybridization of the probe with RNA of the first biological sample, with (b) the amount of hybridization of the probe with RNA of the second biological sample; wherein a statistically significant difference in the amount of hybridization with the RNA of the first clinical sample as compared to the amount of hybridization with the RNA of the second biological sample is indicative of the presence of a MSI-H marker sequence in the first biological sample.

[0199] Alternatively, the present invention provides a method for detection of MSI-H markers comprising in situ hybridization detection of MSI-H marker nucleic acid sequences with a probe derived from a nucleic acid sequence represented by SEQ ID Nos: 1-34, or a sequence complementary thereto. Preferably, the hybridization probe is detectably labeled. The method comprises contacting the labeled hybridization probe with a tissue or cell sample from an individual suspected of having colorectal cancer, washing off any unbound probe, and detecting the signal produced by the detectable label, wherein the detection of the detectable signal is indicative of the presence of an MSI-H marker sequence in the sample, and thus permits the detection of colorectal cancer and/or MSI. Alternatively, the tissue or cell is additionally hybridized with a detectably labeled nucleic acid probe which is capable of specifically hybridizing with a nucleic acid sequence that encodes at least one additional colorectal cancer associated marker. Detection of the second detectably labeled probe is thus indicative of the presence of the additional colorectal cancer associated marker in the sample, and in conjunction with the detection of MSI-H marker sequence, permits the detection of colorectal cancer and/or MSI in the individual. Specific methods for in situ hybridization are well known in the art.

[0200] Alternatively, methods such as PCR, Northern analysis, and Taqman may be used to detect and/or quantitate the expression (and overexpression) of a MSI-H marker nucleic acid sequence in a biological sample. In one embodiment, reverse transcription PCR (RT-PCR) is performed using primers designed to specifically hybridize to a predetermined portion of the MSI-H marker sequence isolated from a biological sample. Generation of a PCR product by such a reaction is thus indicative of the presence of the MSI-H marker sequence in the sample. The technique of designing primers for PCR amplification is well known in the art. Oligonucleotide primers and probes are 5 to 100 nucleotides in length, ideally from 17 to 40 nucleotides, although primers and probes of different length are of use. Primers for amplification are preferably about 17-25 nucleotides. Primers useful according to the invention are also designed to have a particular melting temperature (Tm) by the method of melting temperature estimation. Commercial programs, including Oligo™ (MBI, Cascade, CO), Primer Design and programs available on the internet, including Primer3 and Oligo Calculator can be used to calculate a Tₘ of a nucleic acid sequence useful according to the invention. Preferably, the Tₘ of an amplification primer useful according to the invention, as calculated for example by Oligo Calculator, is preferably between about 45 and 65° C. and more preferably between about 50 and 60° C. Preferably, the Tₘ of a probe useful according to the invention is 7° C. higher than the Tₘ of the corresponding amplification primers. It is preferred that, following generation of cDNA by RT-PCR, the cDNA fragment is cloned into an appropriate sequencing vector, such as a PCRII vector (TA cloning kit; Invitrogen). The identity of each cloned fragment is then confirmed by sequencing in both directions. It is expected that the sequence obtained from sequencing would be the same as the known sequence of the MSI-H marker sequences as described herein.

[0201] Alternatively, the presence of MSI-H marker mRNA sequence may be detected by Northern analysis. Sequence confirmed cDNAs, that is, cDNAs representing the MSI-H marker sequences of the invention (or alternatively an additional colorectal cancer associated marker) are used to produce ³²P-labeled cDNA probes using techniques well known in the art (see, for example, Ausubel, supra). Labeled probes for Northern analysis may also be produced using commercially available kits (Prime-It Kit, Stratagene, La Jolla, Calif.). Northern analysis of total RNA obtained from a clinical sample may be performed using classically described techniques. For example, total RNA samples are denatured with formaldehyde/formamide and run for two hours in a 1% agarose, MOPS-acetate-EDTA gel. RNA is then transferred to nitrocellulose membrane by upward capillary action and fixed by UV cross-linkage. Membranes are pre-hybridized for at least 90 minutes and hybridized overnight at 42° C. Post hybridization washes are performed as known in the art (Ausubel, supra). The membrane is then exposed to x-ray film overnight with an intensifying screen at -80° C. Labeled membranes are then visualized after exposure to film. The signal produced on the x-ray film by the radiolabeled cDNA probes can then be quantified using any technique known in the art, such as scanning the film and quantifying the relative pixel intensity using a computer program such as NIH Image (National Institutes of Health, Bethesda, Md.), wherein the detection of hybridization of a MSI-H marker-specific probe to the clinical sample is indicative of the presence of the MSI-H marker and thus may be used to detect colorectal cancer.

[0202] In an alternate embodiment, the presence and optionally the quantity of MSI-H markers in a clinical sample may be determined using the Taqman™ (Perkin-Elmer, Foster City, Calif.) technique, which is performed with a transcript-specific antisense probe (i.e., a probe capable of specifically hybridizing to a MSI-H marker sequence as described herein). This probe is specific for a MSI-H marker PCR product and is prepared with a quencher and fluorescent reporter probe complexed to the 5′ end of the oligonucleotide. Different fluorescent markers can be attached to different reporters, allowing for measurement of two products in one reaction (e.g., measurement of two or more MSI-H marker sequences; or alternatively, one MSI-H marker sequence and at least one additional colorectal cancer associated marker). When Taq DNA polymerase is activated, it cleaves off the fluorescent reporters by its 5′-to-3′ nucleolytic activity. The reporters, now free of the quenchers, fluoresce. The color change is proportional to the amount of each specific product and is measured by fluorometer; therefore, the amount of each color can be measured and the RT- PCR product can be quantified. The PCR reactions can be performed in 96 well plates so that samples derived from many individuals can be processed and measured simultaneously. The Taqman™ system has the additional advantage of not requiring gel electrophoresis and allows for quantification when used with a standard curve. The Taqman method thus permits the quantification of the expression of MSI-H marker sequences of the invention, and permits a determination of overexpression of such sequences.

[0203] Screening for Polypeptide Molecules

[0204] The MSI-H marker-specific and colorectal cancer marker-specific antibodies described above may be used to detect the presence of MSI-H marker polypeptides encoded by SEQ ID Nos 1-34 or an additional colorectal cancer associated marker in a biological sample by any method known in the art. The immunoassays which can be used include but are not limited to competitive and non-competitive assay systems using techniques such as western blots, radioimmunoassays, ELISA (enzyme linked immunosorbent assay), “sandwich” immunoassays, immunoprecipitation assays, precipitation reactions, gel diffusion precipitin reactions, immunodiffusion assays, agglutination assays, complement-fixation assays, immunoradiometric assays, fluorescent immunoassays, protein A immunoassays, to name but a few. Such assays are routine and well known in the art (see, e.g., Ausubel et al, eds, 1994, Current Protocols in Molecular Biology, Vol. 1, John Wiley & Sons, Inc., New York, which is incorporated by reference herein in its entirety). Exemplary immunoassays are described briefly below (but are not intended by way of limitation).

[0205] Immunoprecipitation protocols generally comprise lysing a population of cells in a lysis buffer such as RIPA buffer (1% NP-40 or Triton X-100, 1% sodium deoxycholate, 0.1% SDS, 0.15 M NaCl, 0.01 M sodium phosphate at pH 7.2, 1% Trasylol) supplemented with protein phosphatase and/or protease inhibitors (e.g., EDTA, PMSF, aprotinin, sodium vanadate), adding the antibody of interest to the cell lysate, incubating for a period of time (e.g., 1-4 hours) at 4 C, adding protein A and/or protein G sepharose beads to the cell lysate, incubating for about an hour or more at 4 C, washing the beads in lysis buffer and resuspending the beads in SDS/sample buffer. In the case of immunonprecipitation of a serum sample, however the above protocol is carried out absent the cell lysis step. The ability of the antibody to immunoprecipitate an MSI-H marker polypeptide (or other colorectal cancer marker) antigen can be assessed by, e.g., western blot analysis. The parameters that can be modified to increase the binding of the antibody to an antigen and decrease the background (e.g., preclearing the cell lysate with sepharose beads) are well known to those of skill in the art (Ausubel et al, supra).

[0206] MSI-H marker polypeptides, and optionally one or more additional colorectal cancer associated markers may be detected in a patient biological sample using Western blot analysis. Briefly, Western blot analysis comprises preparing protein samples, electrophoresis of the protein samples in a polyacrylamide gel (e.g., 8%-20% SDS-PAGE), transferring the protein sample from the polyacrylamide gel to a membrane such as nitrocellulose, PVDF or nylon, blocking the membrane in blocking solution (e.g., PBS with 3% BSA or non-fat milk), washing the membrane in washing buffer (e.g., PBS-Tween 20), blocking the membrane with primary antibody (the antibody of interest) diluted in blocking buffer, washing the membrane in washing buffer, blocking the membrane with a secondary antibody (which recognizes the primary antibody, e.g., an antihuman antibody) conjugated to an enzymatic substrate (e.g., horseradish peroxidase or alkaline phosphatase) or radioactive molecule (e.g., ³²P or ¹²⁵I) diluted in blocking buffer, washing the membrane in wash buffer, and detecting the presence of the antigen. Methods for the optimization of such an analysis are well known in the art (Ausubel, et al., supra).

[0207] Alternatively, the presence of MSI-H marker polypeptides and optionally one or more additional colorectal cancer associated markers in a clinical sample may be detected by ELISA. ELISAs comprise preparing antigen, coating the well of a 96 well microtiter plate (or other suitable container) with the antigen, adding the antibody of interest conjugated to a detectable compound such as an enzymatic substrate (e.g., horseradish peroxidase or alkaline phosphatase) to the well and incubating for a period of time, and detecting the presence of the antigen. In ELISAs the antibody of interest does not have to be conjugated to a detectable compound; instead, a second antibody (which recognizes the antibody of interest, that is, the antibody which will bind to the MSI-H marker peptide or a second colorectal cancer associated marker) conjugated to a detectable compound may be added to the well. Further, instead of coating the well with the antigen, the antibody may be coated to the well. In this case, a second antibody conjugated to a detectable compound may be added following the addition of the antigen of interest to the coated well. This method may be modified or optimized according techniques which are known to those of skill in the art.

[0208] The binding affinity of an antibody to an antigen and the off-rate of an antibody/antigen interaction can be determined by competitive binding assays. One example of such an assay is a radioimmunoassay comprising the incubation of labeled antigen (e.g., an MSI-H marker sequence labeled with 3H or 125I) with an anti-MSI-H marker antibody in the presence of increasing amounts of unlabeled antigen, and the detection of the antibody bound to the labeled antigen. The affinity of the antibody of interest for a particular antigen and the binding off-rates can be determined from the data by scatchard plot analysis. Competition with a second antibody can also be determined using radioimmunoassays. In this case, the antigen is incubated with antibody of interest conjugated to a labeled compound (e.g., 3H or 125I) in the presence of increasing amounts of an unlabeled second antibody.

[0209] Preferably, the above detection assays re be carried out using antibodies to detect the protein product encoded by a nucleic acid having the sequence of SEQ ID Nos: 1-34, or a sequence complementary thereto. Preferably, the protein product has the sequence of one or more of SEQ ID Nos. 35-68. In addition, the above detection assays may be conducted using one or more antibodies which specifically recognize and bind to at least one additional colorectal cancer associated marker. Accordingly, in one embodiment, the assay would include contacting the proteins of the test cell with an antibody specific for the gene product of a nucleic acid represented by SEQ ID Nos: 1-34, or a sequence complementary thereto, and determining the approximate amount of immunocomplex formation by the antibody and the proteins of the test cell, wherein a detection of such an immunocomplex is indicative of the presence of the antigen, and thus, permits the detection of colorectal cancer.

[0210] Immunoassays, useful in the present invention include those described above, and can also include both homogeneous and heterogeneous procedures such as fluorescence polarization immunoassay (FPIA), fluorescence immunoassay (FIA), enzyme immunoassay (EIA), and nephelometric inhibition immunoassay (NIA).

[0211] In another embodiment, the level of the encoded product, i.e., the product encoded by SEQ ID Nos 1-34, or a sequence complementary thereto, in a biological fluid (e.g., blood or urine) of a patient may be determined as a way of monitoring the level of expression of the marker nucleic acid sequence in cells of that patient. Such a method would include the steps of obtaining a sample of a biological fluid from the patient, contacting the sample (or proteins from the sample) with an antibody specific for a encoded marker polypeptide, and determining the amount of immune complex formation by the antibody, with the amount of immune complex formation being indicative of the level of the marker encoded product in the sample. This determination is particularly instructive when compared to the amount of immune complex formation by the same antibody in a control sample taken from a normal individual or in one or more samples previously or subsequently obtained from the same person.

[0212] In another embodiment, the method can be used to determine the amount of marker polypeptide present in a cell, which in turn can be correlated with progression of a hyperproliferative disorder, e.g., colorectal cancer. The level of the marker polypeptide can be used predictively to evaluate whether a sample of cells contains cells which are, or are predisposed towards becoming, transformed cells. Moreover, the subject method can be used to assess the phenotype of cells which are known to be transformed, the phenotyping results being useful in planning a particular therapeutic regimen. For instance, very high levels of the marker polypeptide in sample cells is a powerful diagnostic and prognostic marker for a cancer, such as colorectal cancer. The observation of marker polypeptide level can be utilized in decisions regarding, e.g., the use of more aggressive therapies.

[0213] As set out above, one aspect of the present invention relates to detection assays for determining, in the context of cells isolated from a patient, if the level of a marker polypeptide is significantly reduced in the sample cells. The term “significantly reduced” refers to a cell phenotype wherein the cell possesses a reduced cellular amount of the marker polypeptide relative to a normal cell of similar tissue origin. For example, a cell may have less than about 50%, 25%, 10%, or 5% of the marker polypeptide that a normal control cell. In particular, the assay evaluates the level of marker polypeptide in the test cells, and, preferably, compares the measured level with marker polypeptide detected in at least one control cell, e.g., a normal cell and/or a transformed cell of known phenotype.

[0214] Of particular importance to the subject invention is the ability to quantitate the level of normal or abnormal MSI-H marker expression. The expression of MSI-H markers, and/or the level of expression of MSI-H markers can be used predictively to evaluate whether a patient is predisposed towards developing colorectal cancer, or for determining the severity of colorectal cancer, or for determining the presence of tumors having microsatellite instability.

[0215] In one embodiment, tissue samples may be used to measure MSI-H marker peptide expression by immunohistochemical staining which may be used to determine the number of cells (i.e., colon cells) expressing a given MSI-H marker polypeptide. For such staining, a multiblock of tissue is taken from the biopsy or other tissue sample and subjected to proteolytic hydrolysis, employing such agents as protease K or pepsin. In certain embodiments, it may be desirable to isolate a nuclear fraction from the sample cells and detect the level of the marker polypeptide in the nuclear fraction.

[0216] The tissue samples are fixed by treatment with a reagent such as formalin, glutaraldehyde, methanol, or the like. The samples are then incubated with an antibody, preferably a monoclonal antibody, with binding specificity for a given MSI-H marker polypeptide (or a plurality of MSI-H marker polypeptides) and optionally an additional colorectal cancer associated marker. This antibody may be conjugated to a label for subsequent detection of binding. Samples are incubated for a time sufficient for formation of the immunocomplexes. Binding of the antibody is then detected by virtue of a label conjugated to this antibody. Where the antibody is unlabeled, a second labeled antibody may be employed, e.g., which is specific for the isotype of the anti-marker polypeptide antibody. Examples of labels which may be employed include radionuclides, fluorophores, chemiluminescent labels, enzymes and the like.

[0217] Where enzymes are employed, the substrate for the enzyme may be added to the samples to provide a colored or fluorescent product. Examples of suitable enzymes for use in conjugates include horseradish peroxidase, alkaline phosphatase, malate dehydrogenase and the like. Where not commercially available, such antibody-enzyme conjugates are readily produced by techniques known to those skilled in the art. Other assays, known to those of skill in the art for determining the presence and/or quantity of a polypeptide in a sample (either serum or tissue) are also encompassed by the present invention.

Prognosis, Staging, and Monitoring of Cancer

[0218] In one aspect, the present invention provides methods for determining cancer prognosis and stage based on examining the expression levels of the MSI-H marker sequences and polypeptides using the methods described in the present invention. If cancer is detected in a subject using a technique other than by determining the expression levels of the marker sequences, then the differential expression level of the MSI-H marker sequences can be used to determine the prognosis and stage for the subject. As used herein, prognosis refers to the prediction of the probable course and outcome of a disease.

[0219] It is generally accepted in the art that the MSI status of a colorectal cancer tumor can be predictive of clinical outcome and survival, as well as a patient's response to a particular therapy. For example, patients with MSI-H colon tumors have been shown to have increased survival rates compared with patients having MSS or MSI-L colorectal cancer tumors following 5-flurouracil/levamisole and fluoropyrimidine-based chemotherapy (Elaleh et al., 2000 Oncology 58:52; Elsaley and Iacopetta, 2001, Clinical Colorectal Cancer, 1:104), and that, overall, MSI-H status of colorectal tumors may be indicative of greater sensitivity of such tumors to chemical intervention (See, e.g., Liang et al., 2002, Int. J. Cancer 101:519). In addition, MSI-H colorectal tumors are associated with improved overall survival relative to MSS or MSI-L tumors (Gryfe et al, 2000, New England J. Med. 342:69; Ward et al., 2001, Gut 48:821), and are associated with earlier stage colorectal cancer (Kim et al., 1994, Am. J. Pathol. 145:148; Gafa et al., 2000, Cancer 89:2025; Jemvall et al., 1999, Eur. J. Cancer 35:197). Accordingly, the MSI-H status of colorectal tumors, as determined using the overexpression of the MSI-H marker sequences described herein, may be used as a prognostic indicator, may be used to design or select treatment regimes for a given patient, and may be used to stage colorectal cancers.

[0220] In general, methods used for prognosis or stage of cancer involve comparison of the amount of the MSI-H marker sequences in a sample of interest with that of a control to detect relative differences in the expression of the MSI-H marker sequences, wherein the difference can be measured qualitatively and/or quantitatively. For example, the expression levels of one or more MSI-H marker RNAs or polypeptides can be compared with the expression levels of the same MSI-H marker RNAs or polypeptides in cancer free or normal samples. Alternatively, the expression levels of one or more MSI-H marker RNAs or polypeptides can also be compared with the expression levels of the same MSI-H marker RNAs or polypeptides observed in cancers that are known not to progress. In addition, the expression levels of one or more MSI-H marker RNAs or polypeptides can also be compared with the expression levels of the same MSI-H marker RNAs or polypeptides observed in cancers that are known to progress and/or metastasize.

[0221] Also, as used herein, cancer stage refers to the sequence of the events, in which cancer develops and causes symptoms. In addition, staging is a process used to describe how advanced the cancerous state is in patient. Staging systems vary with the types of cancer, but generally involve the following “TNM” system: the type of tumor, indicated by T; whether the cancer has metastasized to nearby lymph nodes, indicated by N; and whether the cancer has metastasized to more distant parts of the body, indicated by M. Generally, if a cancer is only detectable in the area of the primary lesion without having spread to any lymph nodes it is called Stage I. If it has spread only to the closest lymph nodes, it is called Stage II. In Stage III, the cancer has generally spread to the lymph nodes in near proximity to the site of the primary lesion. Cancers that have spread to a distant part of the body, such as the liver, bone, brain or other site, are Stage IV, the most advanced stage. Methods of the present invention are useful in assaying the staging of cancer. The staging of cancer can be accomplished by determining the expression levels of one or more MSI-H marker nucleic acid or polypeptide relative to a reference expression levels of the same MSI-H marker nucleic acid or polypeptide. The reference expression levels of the marker RNAs or polypeptides can be that from cancer free or healthy or cancer samples, wherein the cancer can be at different stages in development, or alternatively, may be derived from an adjacent portion of the colon which is not infiltrated by tumor.

[0222] The present invention further provides methods of monitoring cancer progression or recurrence by measuring the expression levels of the MSI-H marker nucleic acids or polypeptides over the time. In one embodiment, the methods comprise:

[0223] (1). detecting in a biological sample of the subject at a first point in time, the expression of one or more nucleic acid sequences comprising one or more nucleic acid sequences selected from the group consisting of SEQ ID NOs: 1-34;

[0224] (2). repeating step (a) at a subsequent point in time; and

[0225] (3). comparing the expression level detected in steps (a) and (b), wherein a change in the expression level is indicative of progression of cancer or a pre-malignant condition thereof in the subject.

[0226] In another embodiment, the methods comprise:

[0227] (1). detecting in a biological sample of the subject at a first point in time, the expression of one or more polypeptides comprising one or more polypeptide sequences selected from the group consisting of SEQ ID NOs: 35-68;

[0228] (2). repeating step (a) at a subsequent point in time; and

[0229] (3). comparing the expression level detected in steps (a) and (b), wherein a change in the expression level is indicative of progression of cancer or a pre-malignant condition thereof in the subject.

[0230] For example, elevated expression levels of one or more over-expressed MSI-H marker nucleotides or polypeptides, or reduced expression levels of one or more under-expressed MSI-H marker nucleotides or polypeptides in a subsequent point in time relative to an earlier point in time, indicate that the cancer is progressing to a more severe stage. On the other hand, reduced expression levels of one or more over-expressed MSI-H marker nucleotides or polypeptides, or elevated expression levels of one or more under-expressed MSI-H marker nucleotides or polypeptides in a subsequent point in time relative to an earlier point in time, indicate that the cancer is not progressing or is progressing slowly.

[0231] The methods used in prognosis, staging, and monitoring cancer can be applied to various types of cancer. Examples of cancer include but not limited to, adenocarcinoma, lymphoma, blastoma, melanoma, sarcoma, and leukemia. More particularly, examples of cancer also include squamous cell cancer, small-cell lung cancer, non-small cell lung cancer, gastrointestinal cancer, Hodgkin's and non-Hodgkin's lymphoma, pancreatic cancer, glioblastoma, cervical cancer, ovarian cancer, liver cancer such as hepatic carcinoma and hepatoma, bladder cancer, breast cancer, colon cancer, colorectal cancer, endometrial carcinoma, salivary gland carcinoma, kidney cancer such as renal cell carcinoma and Wilms' tumors, basal cell carcinoma, melanoma, prostate cancer, vulval cancer, thyroid cancer, testicular cancer, esophageal cancer, and various types of head and neck cancer. Preferably, the cancers include breast, colon, and lung cancer. More preferably, the cancer is colon cancer, and the MSI-H marker sequences are the ones comprising a nucleic acid sequence selected from the group consisting of SEQ ID NOs: 1-34.

Efficacy of Therapy and Therapeutic Compositions

[0232] Because MSI status permits one of skill in the art to make determinations regarding treatment strategies, in one aspect, the present invention also provides methods that permit the assessment and/or monitoring of patients who will be likely to benefit from both traditional and non-traditional treatments and therapies for cancers, particularly colon cancer. The present invention thus embraces testing, screening and monitoring of patients undergoing anti-cancer treatments and therapies, used alone, in combination with each other, and/or in combination with anti-cancer drugs, anti-neoplastic agents, chemotherapeutics and/or radiation and/or surgery, to treat cancer patients.

[0233] An advantage of the present invention is the ability to monitor, or screen over time, those patients who can benefit from one, or several, of the available cancer therapies, and preferably, to monitor patients receiving a particular type of therapy, or a combination therapy, over time to determine how the patient is faring from the treatment(s), if a change, alteration, or cessation of treatment is warranted; if the patient's disease has been reduced, ameliorated, or lessened; or if the patient's disease state or stage has progressed, or become metastatic or invasive. The cancer treatments embraced herein also include surgeries to remove or reduce in size a tumor, or tumor burden, in a patient. Accordingly, the methods of the invention are useful to monitor patient progress and disease status post-surgery.

[0234] The identification of the correct patients for a cancer therapy according to this invention can provide an increase in the efficacy of the treatment and can avoid subjecting a patient to unwanted and life-threatening side effects of the therapy. By the same token, the ability to monitor a patient undergoing a course of therapy using the methods of the present invention can determine whether a patient is adequately responding to therapy over time, to determine if dosage or amount or mode of delivery should be altered or adjusted, and to ascertain if a patient is improving during therapy, or is regressing or is entering a more severe or advanced stage of disease, including invasion or metastasis, as discussed further herein.

[0235] A method of monitoring according to this invention reflects the serial, or sequential, testing or analysis of a cancer patient by testing or analyzing the patient's body fluid sample over a period of time, such as during the course of treatment or therapy, or during the course of the patient's disease. For instance, in serial testing, the same patient provides a body fluid sample, e.g., serum or plasma, or has sample taken, for the purpose of observing, checking, or examining the expression levels of one or more of the MSI-H markers (DNA, RNA or polypeptide) of the invention in the patient by measuring the levels of one or more of these MSI-H markers during the course of treatment, and/or during the course of the disease, according to the methods of the invention.

[0236] Similarly, a patient can be screened over time to assess the levels of one or more of the MSI-H markers in a biological sample for the purposes of determining the status of his or her disease and/or the efficacy, reaction, and response to cancer or neoplastic disease treatments or therapies that he or she is undergoing. It will be appreciated that one or more pretreatment sample(s) is/are optimally taken from a patient prior to a course of treatment or therapy, or at the start of the treatment or therapy, to assist in the analysis and evaluation of patient progress and/or response at one or more later points in time during the period that the patient is receiving treatment and undergoing clinical and medical evaluation.

[0237] In monitoring a patient's levels of one or more of the MSI-H markers of the invention over a period of time, which may be days, weeks, months, and in some cases, years, or various intervals thereof, the patient's body fluid sample, e.g., a serum or plasma sample, is collected at intervals, as determined by the practitioner, such as a physician or clinician, to determine the levels of one or more of the MSI-H markers in the cancer patient compared to the respective levels of one or more of these analytes in normal individuals over the course or treatment or disease. For example, patient samples can be taken and monitored every month, every two months, or combinations of one, two, or three month intervals according to the invention. Quarterly, or more frequent monitoring of patient samples, is advisable.

[0238] The levels of the one or more MSI-H markers found in the patient are compared with the respective levels of the one or more of these markers in normal individuals, and with the patient's own MSI-H marker levels, for example, obtained from prior testing periods, to determine treatment or disease progress or outcome. Accordingly, use of the patient's own MSI-H marker levels monitored over time can provide, for comparison purposes, the patient's own values as an internal personal control for long-term monitoring of marker levels, and thus cancer presence and/or progression. As described herein, following a course of treatment or disease, the determination of an increase or a decrease in one or more of the MSI-H marker levels in the cancer patient over time compared to the respective levels of one or more of these MSI-H markers in normal individuals reflects the ability to determine the severity or stage of a patient's cancer, or the progress, or lack thereof, in the course or outcome of a patient's cancer therapy or treatment.

[0239] Increases or decreases in the levels of the MSI-H markers in cancer patients are determined by comparing the values obtained from analyzing cancer patient samples compared to the normal control range expression levels. A MSI-H marker is said to be over- expressed if expression of the marker is at least 2 fold greater in the cancer patient relative to a normal control, and a MSI-H marker is said to be under expressed if the expression of the marker is at least 2 fold greater in the normal control relative to in the cancer patient.

[0240] In monitoring a patient over time, a reduction in the levels of one or more of a patient's MSI-H marker levels from increased levels (i.e., at least 2 fold over-expressed) compared to normal range values to levels at or near to the levels of the analytes found in normal individuals is indicative of treatment progress or efficacy, and/or disease improvement, remission, tumor reduction or elimination, and the like. Likewise, in all of the methods described in the embodiments of this invention, a determination of a reduction of one or more of a patient's MSI-H marker levels from an elevated level (i.e., at least 2 fold over- expressed) to, or approximately to, the respective levels of one or more of these analytes found in normal individuals provides a further aspect of the methods of the invention, in which a patient's improvement, recovery or remission, and/or treatment progress or efficacy, is able to be ascertained over time following performance of the method.

[0241] Another embodiment of the present invention encompasses a method of monitoring a cancer patient's course of disease, or the efficacy of a cancer patient's treatment or therapy. The patient's treatment or therapy can involve traditional therapies, such as hormone therapy, chemotherapeutic drug therapy, radiation, or novel therapies, or a combination of any of the foregoing. The method involves measuring levels of one or more MSI-H markers in a body fluid sample of the cancer patient and determining if the levels of one or more of the markers in the patient's sample are changed by at least 2 fold compared to the respective levels of one or more of these analytes in normal controls during the course of disease or cancer treatment. In accordance with the method, a change in the levels of the MSI-H marker in the cancer patient compared to the respective levels of the MSI-H marker in normal controls is indicative of a change in stage, grade, severity or progression of the patient's cancer and/or a lack of efficacy or benefit of the cancer treatment or therapy provided to the patient during a course of treatment, e.g., poor treatment or clinical outcome.

[0242] As will be understood by the skilled practitioner in the art, the monitoring method according to this invention is preferably, performed in a serial or sequential fashion, using samples taken from a patient during the course of disease, or a disease treatment regimen, (e.g., after a number of days, weeks, months, or occasionally, years, or various multiples of these intervals) to allow a determination of disease progression or outcome, and/or treatment efficacy or outcome. If the sample is amenable to freezing or cold storage, the samples may be taken from a patient (or normal individual) and stored for a period of time prior to analysis.

[0243] In another of its embodiments, the present invention encompasses the determination of the amounts or levels of one or more additional cancer markers in conjunction with the determination of the levels of one or more of the markers of the invention in a sample to be analyzed.

[0244] The present invention also includes a method of assessing the efficacy of a test composition for inhibiting cancers, such as colon cancer. As described above, differential expression levels of the MSI-H marker sequences of the invention correlate with the cancerous state of cancer cells, particularly colon cancer cells. It is recognized that changes in the expression levels of the MSI-H marker sequences of the present invention may result from, or induce the cancerous state of cells. Thus, composition which inhibit cancer in a patient will cause the expression levels of the MSI-H marker sequences to change to a level near the normal level of expression for the marker sequences. The method thus comprises comparing expression levels of one or more MSI-H marker sequences in a first biological sample maintained in the presence of a test composition with those of the same MSI-H marker sequences in a second biological sample maintained in the absence of the test composition. A significant difference in the expression levels of one or more marker sequences is an indication that the test composition inhibits the cancer. In a preferred embodiment, the cancer is colon cancer, and the MSI-H marker sequences are the ones listed in SEQ ID Nos 1-34 and/or 35-68. In another embodiment, the cell samples may be aliquots of a single sample obtained from either a healthy subject or a patient with cancerous conditions.

Modulators of the Marker Sequences

[0245] It is recognized that changes in the expression levels of the MSI-H marker sequences likely induce, maintain, and promote the cancerous state of cells. Thus, another aspect of the present invention is directed to the modulators of the MSI-H marker sequences capable of modulating the differentiation and proliferation of cells. In this regard, the present invention provides assays for determining compounds that modulate the expression of the marker sequences. The compounds can be used to modulate the biological activity of the polypeptides encoded by the MSI-H marker sequences or the MSI-H marker sequences themselves. Compounds can also be useful in a variety of different environments, including as medicinal agents to treat or prevent disorders associated with cancer.

[0246] Methods of identifying compounds generally comprise steps in which a compound is placed in contact with a MSI-H marker sequence, its transcription product, its translation product, or other target, and determination of whether the compound modulates the marker sequence. For modulating the expression of a MSI-H marker sequence, a method can comprise, in any effective order, one or more of the following steps, e.g., contacting the marker sequence (e.g., in a cell population) with a test compound under conditions effective for said test compound to modulate the expression of the marker sequence, and determining whether said test agent modulates said sequence. A compound can modulate expression of a sequence at any level, including transcription (e.g., by modulating the promoter), translation, and/or maintenance of the nucleic acid (e.g., degradation, stability, etc.) in the cell.

[0247] For modulating the biological activity of polypeptides, a method can comprise, in any effective order, one or more of the following steps, e.g., contacting a polypeptide (e.g., in a cell, lysate, or isolated) with a test compound under conditions effective for said test agent to modulate the biological activity of said polypeptide, and determining whether said test compound modulates said biological activity.

[0248] Contacting the polynucleotide or polypeptide with the test compound can be accomplished by any suitable method and/or means that places the compound in a position to functionally control expression or biological activity of the gene or its product in the sample. Functional control indicates that the compound can exert its physiological effect through whatever mechanism it works. The choice of the method and/or means can depend upon the nature of the compound and the condition and type of environment in which the gene or its product is presented, e.g., lysate, isolated, or in a cell population (such as, in vivo, in vitro, organ explants, etc.). For example, if the cell population is an in vitro cell culture, the compound can be contacted with the cells by adding it directly into the culture medium. If the compound cannot dissolve readily in an aqueous medium, it can be incorporated into liposomes, or another lipophilic carrier, and then administered to the cell culture. Contact can also be facilitated by incorporation of compound with carriers and delivery molecules and complexes, by injection, by infusion, etc.

[0249] After the agent has been administered in such a way that it can gain access to the gene or gene product (e.g., MSI-H marker, including DNA, mRNA, and polypeptides), it can be determined whether the test compound modulates its expression or biological activity. Modulation can be of any type, quality, or quantity, e.g., increase, facilitate, enhance, up- regulate, stimulate, activate, amplify, augment, induce, decrease, down-regulate, diminish, lessen, reduce, etc. The modulatory quantity can also encompass any value, e.g., 1%, 5%, 10%, 50%, 75%, 1-fold, 2-fold, 5-fold, 10-fold, 100-fold, etc. To modulate gene expression means, e.g., that the test compound has-an effect on its expression, e.g., to effect the amount of transcription, to effect RNA splicing, to effect translation of the RNA into polypeptide, to effect RNA or polypeptide stability, to effect polyadenylation or other processing of the RNA, to effect post-transcriptional or post- translational processing, etc. To modulate biological activity means, e.g., that a functional activity of the polypeptide is changed in comparison to its normal activity in the absence of the compound. This effect includes, increase, decrease, block, inhibit, enhance, etc.

[0250] A test compound can be of any molecular composition, e.g., chemical compounds, biomolecules, such as polypeptides, lipids, nucleic acids (e.g., antisense to a polynucleotide) carbohydrates, antibodies, ribozymes, double-stranded RNA, aptamers, etc. For example, if a MSI-H marker polypeptide to be modulated is a cell-surface molecule, a test compound can be an antibody that specifically recognizes it and, e.g., causes the polypeptide to be internalized, leading to its down regulation on the surface of the cell. Such effect does not have to be permanent, but can require the presence of the antibody to continue the down- regulatory effect. Antibodies can also be used to modulate the biological activity of a polypeptide in a lysate or other cell-free form.

Drug Screening

[0251] Several in vivo methods can be used to identify compounds that modulate expression of MSI-H marker nucleic acids (SEQ ID Nos: 1-34, or a sequence complementary thereto) and/or alter for example, inhibit the bioactivity of the encoded polypeptide (e.g., SEQ ID Nos: 35-68).

[0252] Drug screening is performed by adding a test compound to a sample of cells, and monitoring the effect. A parallel sample which does not receive the test compound is also monitored as a control. The treated and untreated cells are then compared by any suitable phenotypic criteria, including but not limited to microscopic analysis, viability testing, ability to replicate, histological examination, the level of a particular RNA or polypeptide associated with the cells, the level of enzymatic activity expressed by the cells or cell lysates, and the ability of the cells to interact with other cells or compounds. Differences between treated and untreated cells indicates effects attributable to the test compound.

[0253] Desirable effects of a test compound include an effect on any phenotype that was conferred by the cancer-associated marker nucleic acid sequence. Examples include a test compound that limits the overabundance of mRNA, limits production of the encoded protein, or limits the functional effect of the protein. The effect of the test compound would be apparent when comparing results between treated and untreated cells.

[0254] The invention thus also encompasses methods of screening for agents which inhibit expression of MSI-H marker nucleic acid (SEQ ID Nos: 1-34, or a sequence complementary thereto) in vitro, comprising exposing either a cell or tissue in which MSI-H marker nucleic acid mRNA is detectable or cultured cells comprising and capable of expressing MSI-H marker nucleic acid to an agent in order to determine whether the agent is capable of inhibiting production of the mRNA; and determining the level of mRNA in the exposed cells or tissue, wherein a decrease in the level of the mRNA after exposure of the cell line to the agent is indicative of inhibition of the marker nucleic acid mRNA production.

[0255] Alternatively, the screening method may include in vitro screening of a cell or tissue in which MSI-H marker nucleic acid is overexpressed or polypeptide is detectable, or cultured cells which express MSI-H markers, or in which MSI-H marker nucleic acids are overexpressed, to an agent suspected of inhibiting expression of MSI-H marker nucleic acid and/or production of MSI-H marker protein; and determining the level of the MSI-H marker polynucleotide or polypeptide in the cells or tissue, wherein a decrease in the level of marker polynucleotide or polypeptide after exposure of the cells or tissue to the agent is indicative of inhibition of marker protein production or marker polypeptide expression.

[0256] The invention also encompasses in vivo methods of screening for agents which inhibit expression of the marker nucleic acids, comprising exposing a mammal having tumor cells or serum in which MSI-H marker mRNA or protein is detectable to an agent suspected of inhibiting production of marker mRNA or protein; and determining the level of marker mRNA or protein in serum or tumor cells of the exposed mammal. A decrease in the level of marker mRNA or protein after exposure of the mammal to the agent is indicative of inhibition of marker nucleic acid expression. Optionally, the effect of the candidate agent on the expression of at least one additional colorectal cancer associated marker may also be determined.

[0257] Accordingly, the invention provides a method comprising incubating a cell expressing the marker nucleic acids (SEQ ID Nos: 1-34, or a sequence complementary thereto) with a test compound and measuring the DNA, mRNA, or protein level. The invention further provides a method for quantitatively determining the level of expression of the marker nucleic acids in a cell population or biological sample, and a method for determining whether an agent is capable of increasing or decreasing the level of expression of the MSI-H marker nucleic acid in a cell population or biological sample. In one embodiment, a method for determining whether an agent is capable of increasing or decreasing the level of expression of MSI-H marker nucleic acid in a cell population comprises the steps of (a) preparing cell extracts from control and agent-treated cell populations, (b) isolating MSI-H marker polypeptide from the cell extracts, (c) quantifying (e.g., in parallel) the amount of an immunocomplex formed between MSI-H marker polypeptide and an antibody specific to said polypeptide. The MSI-H marker polypeptide of this invention may also be quantified by assaying for its bioactivity. Agents that induce an increase in MSI-H marker nucleic acid expression may be identified by their ability to increase the amount of immunocomplex formed in the treated cell as compared with the amount of the immunocomplex formed in the control cell. In a similar manner, agents that decrease expression of MSI-H marker nucleic acid may be identified by their ability to decrease the amount of the immunocomplex formed in the treated cell extract as compared to the control cell. mRNA levels can be determined by Northern blot hybridization. mRNA levels can also be determined by methods involving PCR. Other sensitive methods for measuring mRNA, which can be used in high throughput assays, e.g., a method using a DELFIA endpoint detection and quantification method, are described, e.g., in Webb and Hurskainen (1996) Journal of Biomolecular Screening 1:119. MSI-H marker protein levels can be determined by immunoprecipitations or immunohistochemistiy using an antibody that specifically recognizes the protein product of SEQ ID Nos: 35-68.

[0258] Agents that are identified as active in the drug screening assay are candidates to be tested for their capacity to block cell proliferation activity. These agents would be useful for treating a disorder involving aberrant growth of cells, especially colon cells, especially colorectal cancer.

[0259] A variety of assay formats will suffice and, in light of the present disclosure, those not expressly described herein will nevertheless be comprehended by one of ordinary skill in the art. For instance, the assay can be generated in many different formats, and include assays based on cell-free systems, e.g., purified proteins or cell lysates, as well as cell-based assays which utilize intact cells.

[0260] In many drug screening programs which test libraries of compounds and natural extracts, high throughput assays are desirable in order to maximize the number of compounds surveyed in a given period of time. Assays of the present invention which are performed in cell-free systems, such as may be derived with purified or semi-purified proteins or with lysates, or with proteins purified or semi-purified from serum, are often preferred as “primary” screens in that they can be generated to permit rapid development and relatively easy detection of an alteration in a molecular target which is mediated by a test compound. Moreover, the effects of cellular toxicity and/or bioavailability of the test compound can be generally ignored in the in vitro system, the assay instead being focused primarily on the effect of the drug on the molecular target as may be manifest in an alteration of binding affinity with other proteins or changes in enzymatic properties of the molecular target.

### EXAMPLES

### Example 1

### Identification of Differentially Expressed Sequences

[0261] Thirty-four pairs of well-characterized, microdissected samples of colorectal cancer tissue and matched normal adjacent tissues were obtained from consenting patients. The location in the colon, stage of disease, and microsatellite status were determined for each sample. Total RNA was extracted from the samples using RNeasy kits (QIAGEN, Valencia, Calif.) according to the manufacturer's instructions. Each purified RNA sample was visually inspected for quality on an agarose gel, and quantified using the RiboGreen® assay (Molecular Probes, Eugene, Oreg.).

[0262] To identify differentially expressed genes, expression profiling was performed on custom, high-density nylon membrane arrays. Arrays were generated by spotting sequence- verified PCR products onto Nytran® SuperCharge nylon membranes (Schleicher & Schuell BioScience, Inc., Keene, N.H.) using a BioGrid robotic arrayer (Genomic Solutions Inc., Ann Arbor, Mich.). These arrays contain over 13,000 clones, which represent ˜5400 distinct genes.

[0263] Due to the limited amount of RNA isolated from the microdissected samples, one microgram of total RNA from each sample was amplified using SMART™ technology (BD Biosciences/Clontech, Palo Alto, Calif.), which maintains the original representation of the RNA sample. Complex ³³P-labeled probes were prepared from the amplified cDNA. Probes from matched tumor and normal tissue were hybridized to identical nylon membranes. Signals were captured via a Storm™ Phosphorimager (Amersham Biosciences, Piscataway, N.J.) and analyzed via ArrayVision™ (Imaging Research Inc., St. Catharines, Ontario, Canada) and GeneSpring software (Silicon Genetics, Redwood City, Calif.).

[0264] Expression data were normalized and scaled according to the GeneSpring default parameters. For each array, the signal of each spot was divided by the average signal of all the spots on the particular array. Next, the signal for each gene was divided by the median signal of that gene from all measurements. Finally, the signals from each cancer sample were divided by the signals from the matched normal sample to generate the ratio data for each tumor normal pair. Data represented in this manner indicate the fold overexpression (or underexpression) for each gene on the array. Values greater than 1.0 represent genes that are overexpressed in the tumor tissue relative to the normal tissue, while values less than 1.0 indicated those genes that are underexpressed.

[0265] To identify genes that were overexpressed in the MSI-H tumors, a series of filters was used to reduce the data set. Starting with the entire normalized data set, both parametric and non-parametric tests were used to define genes that were statistically associated with either the MSI-H tumors or the MSS tumors. Next, for each of these two sets, a filter was used to set a high threshold for a minimum expression level in the MSI-H tumors. Specifically, this filter selected those genes in the MSI-H tumors that were at least 7 fold overexpressed in any one of the 15 tumor/normal pairs. Finally, a Venn diagram was utilized to determine the distinct genes from these two similarly derived sets. This analysis resulted in 34 genes that were overexpressed in the MSI-H tumors, but not in the MSS tumors. These genes are identified in Table 1.

[0266] An example of a differentially expressed gene, REG4, is shown in FIG. 1. In this graph, the 15 MSI-H tumors are grouped on the left side of the x-axis, and the 19 MSS tumors are on the right. The y-axis represents the fold overexpression of REG4 in each of the matched tumor/normal pairs. REG4 was greater than 2 fold overexpressed in 7 of the 15 MSI-H tumors, but was not significantly overexpressed in any of the 19 MSS tumors. The average fold overexpression of REG4 was 5.4 in the MSI-H tumors, and 1.0 in the MSS tumors.

### Other Embodiments

[0267] Other embodiments will be evident to those of skill in the art. It should be understood that the foregoing detailed description is provided for clarity only and is merely exemplary. The spirit and scope of the present invention are not limited to the above examples, but are encompassed by the following claims.

1. A method of detecting microsatellite instability in an individual comprising:
measuring the expression of the sequence of one or more of SEQ ID Nos 1-34 in said individual, wherein microsatellite instability is detected where said sequence is overexpressed by at least 2-fold compared to the expression of said sequence in an individual known to not have microsatellite instability.

2. The method of claim 1, wherein the step of measuring comprises:
(a) obtaining a colorectal tissue sample from said individual;
(b) contacting said sample with a nucleic acid probe which is capable of hybridizing under stringent hybridization conditions to said sequence of one or more of SEQ ID Nos 1-34;
(c) detecting hybridization of said nucleic acid probe to said sequence of one or more of SEQ ID Nos 1-34.

3. The method of claim 1, wherein said individual is a human.

4. The method of claim 2, wherein said nucleic acid probe is detectably labeled.

5. A method of identifying colon tissue having microsatellite instability, comprising:
(a) obtaining a colon tissue sample from an individual;
(b) detecting the expression of one or more of the sequences of SEQ ID Nos 1-34, wherein colon tissue having microsatellite instability is detected if the expression of said one or more of the sequences of SEQ ID Nos 1-34 is at least 2-fold greater than that of the same sequence in a colon tissue sample known to not have microsatellite instability.

6. The method of claim 5, wherein said step of detecting comprises:
(a) contacting said colon tissue sample with a nucleic acid probe which is capable of hybridizing under stringent hybridization conditions to said one or more of the sequences of SEQ ID Nos 1-34; and
(b) detecting hybridization of said nucleic acid probe to said one or more sequences, wherein detection of hybridization is indicative of the expression of said one or more of the sequences of SEQ ID Nos 1-34.

7. The method of claim 6, wherein said nucleic acid probe is detectably labeled.

8. The method of claim 5, wherein said individual is a human.

9. The method of claim 5, wherein said colon tissue sample is a tumor sample.

10. The method of claim 9, wherein said tumor is a malignant tumor.

11. A method of monitoring the onset, progression, or regression of cancer or a pre- malignant condition thereof in a subject, the method comprising:
(a) detecting in a biological sample of the subject at a first point in time, the expression of one or more nucleic acid sequences comprising one or more nucleic acid sequences selected from the group consisting of SEQ ID NOs: 1-34;
(b) repeating step (a) at a subsequent point in time; and
(c) comparing the expression level detected in steps (a) and (b), wherein a change in the expression level is indicative of progression of cancer or a pre-malignant condition thereof in the subject.

12. The method of claim 11, wherein the change in the expression level is either an increase or decrease.

13. The method of claim 12, wherein said increase or decrease is an increase or decrease of at least 2 fold.

14. A method of determining prognosis for cancer or a pre-malignant condition thereof in a subject, comprising:
(a) detecting in a biological sample of the subject, the expression level of one or more nucleic acid sequences comprising one or more nucleic acid sequences selected from the group consisting of SEQ ID NOs: 1-34;
(b) comparing the expression level detected in steps (a) with a reference expression level of said nucleic acid sequences; and
(c) evaluating the prognosis of the subject based on the comparison in step (b).

15. The method of claim 14, wherein the reference expression level is the expression level of said nucleic acid sequences in cancer free or normal sample.

16. The method of claim 14, wherein the reference expression level is the expression level of said nucleic acid sequences in cancer samples that are known not to progress to aggressive form.

17. The method of claim 14, wherein the reference expression level is the expression level of said nucleic acid sequence in a MSS colon tumor.

18. A method of determining the efficacy of a test compound for inhibiting cancer in a subject, the method comprising comparing a) the expression level of one or more nucleic acid sequences in a first biological sample from the subject wherein the sample has been exposed to the test compound, with b) the expression level of said nucleic acid sequences in a second biological sample from the subject wherein the sample has not been exposed to the test compound, said nucleic acid sequences comprising one or more nucleic acid sequences selected from the group consisting of SEQ ID NOs: 1-34, wherein a change of at least two fold in the expression level of said nucleic acid sequences is an indication that the test compound is efficacious for inhibiting cancer in the subject.

19. The method of claim 18, wherein the change in the expression level is either an increase or decrease.

20. A method of determining the efficacy of a therapy for inhibiting cancer in a subject, the method comprising comparing a) the expression level of one or more nucleic acid sequences in a first biological sample from the subject prior to providing at least a portion of the therapy to the subject, with b) the expression level of said nucleic acid sequences in a second biological sample from the subject following the provision of at least a portion of the therapy, said nucleic acid sequences comprising one or more nucleic acid sequences selected from the group consisting of SEQ ID NOs: 1-34, wherein a change of at least two fold in the expression level of said nucleic acid sequences is an indication that the therapy is efficacious for inhibiting cancer in the subject.

21. The method of claim 20, wherein the change in the expression level is either an increase or decrease.

22. A method of selecting a composition for inhibiting cancer in a subject, the method comprising:
(a) obtaining a first biological sample comprising cancer cells from the subject;
(b) separately exposing aliquots of the sample in the presence of a plurality of test compositions;
(c) comparing the expression level of one or more nucleic acid sequences in each of the aliquots from (b) with the expression level in the sample produced by (a), said nucleic acid sequences comprising one or more nucleic acid sequences selected from the group consisting of SEQ ID NOs: 1-34; and
(d) selecting one of the test compositions which induces a change of at least two fold in the expression level of said nucleic acid sequences in one aliquot containing the test composition.

23. The method of claim 22, wherein the change in the expression level is either an increase or decrease.

24. A method of monitoring the onset, progression, or regression of cancer in a subject, comprising:
(a) contacting at a first point in time a first biological sample with one or more polypeptide ligands that specifically bind to one or more polypeptides comprising a polypeptide sequence selected from the group consisting of SEQ ID NOs: 35-68, determining specific binding between the polypeptide ligands and the polypeptides;
(b) contacting at a subsequent point in time a second biological sample with said polypeptide ligands that specifically bind to one or more polypeptides comprising a polypeptide sequence selected from the group consisting of SEQ ID NOs: 35-68, determining specific binding between the polypeptide ligands and the polypeptides; and
(c) comparing the specific binding in the first biological sample to the specific binding in the second biological sample, wherein a significant change in the specific binding is an indication of the onset, progression, or regression of cancer.

25. A method of determining prognosis for cancer or a pre-malignant condition thereof in a subject, comprising:
(a) contacting a biological sample obtained from a subject having cancer with one or more polypeptide ligands that bind specifically to one or more polypeptides comprising a polypeptide sequence selected from the group consisting of SEQ ID NOs: 35-68;
(b) determining specific binding;
(c) comparing the specific binding between the polypeptide ligands and the polypeptides in the sample with the specific binding between the polypeptide ligands and the polypeptides either in a cancer-free sample or in a cancer sample that is known not to progress to aggressive form; and
(d) evaluating the prognosis of the subject based on the comparison in step (c).

26. A method of determining the efficacy of a test compound for inhibiting cancer in a subject, the method comprising comparing a) in a first biological sample from the subject binding between one or more polypeptide ligands that specifically bind to one or more polypeptides comprising a polypeptide sequence selected from the group consisting of SEQ ID NOs: 35-68 and one or more polypeptides comprising a polypeptide sequence selected from the group consisting of SEQ ID NOs: 35-68, wherein the sample has not been exposed to the test compound, with b) in a second biological sample from the subject, the specific binding of said polypeptide ligands and said polypeptides, wherein the sample has been exposed to the test compound, and wherein a significant change in the specific binding is an indication that the test compound is efficacious for inhibiting cancer in the subject.

27. A method of determining the efficacy of a therapy for inhibiting cancer in a subject, comprising comparing a) in a first biological sample from the subject prior to a treatment, binding between one or more polypeptide ligands that specifically bind to one or more polypeptides comprising a polypeptide sequence selected from the group consisting of SEQ ID NOs: 35-68 and one or more polypeptides comprising a polypeptide sequence selected from the group consisting of SEQ ID NOs: 35-68, with b) in a second biological sample from the subject following the treatment, the specific binding of said polypeptide ligands and said polypeptides, and wherein a significant change in the specific binding is an indication that the test compound is efficac for inhibiting cancer in the subject.

The application's sequence listing, which the Patent Office published only in electronic form, follows.

SEQUENCE LISTING (202 sequences)

SEQ ID NO: 1 - DNA, 1285 bp, Homo sapiens
ataagacttttatggatggattgtttttctcaaataatattatcgctttgtgactaaagtaaagattattaattcctgaggcaagaagatataaaagctccagaaacgttgactgggaccactggagacactgaagaaggcaggggcccttagagtcttggttgccaaacagatttgcagatcaaggagaacccaggagtttcaaagaagcgctagtaaggtctctgagatccttgcactagctacatcctcagggtaggaggaagatggcttccagaagcatgcggctgctcctattgctgagctgcctggccaaaacaggagtcctgggtgatatcatcatgagacccagctgtgctcctggatggttttaccacaagtccaattgctatggttacttcaggaagctgaggaactggtctgatgccgagctcgagtgtcagtcttacggaaacggagcccacctggcatctatcctgagtttaaaggaagccagcaccatagcagagtacataagtggctatcagagaagccagccgatatggattggcctgcacgacccacagaagaggcagcagtggcagtggattgatggggccatgtatctgtacagatcctggtctggcaagtccatgggtgggaacaagcactgtgctgagatgagctccaataacaactttttaacttggagcagcaacgaatgcaacaagcgccaacacttcctgtgcaagtaccgaccatagagcaagaatcaagattctgctaactcctgcacagccccgtcctcttcctttctgctagcctggctaaatctgctcattatttcagaggggaaacctagcaaactaagagtgataagggccctactacactggcttttttaggcttagagacagaaactttagcattggcccagtagtggcttctagctctaaatgtttgccccgccatccctttccacagtatccttcttccctcctcccctgtctctggctgtctcgagcagtctagaagagtgcatctccagcctatgaaacagctgggtctttggccataagaagtaaagatttgaagacagaaggaagaaactcaggagtaagcttctagaccccttcagcttctacacccttctgccctctctccattgcctgcaccccaccccagccactcaactcctgcttgtttttcctttggccataggaaggtttaccagtagaatccttgctaggttgatgtgggccatacattcctttaataaaccattgtgtacataagaaaaaaaaaa

SEQ ID NO: 2 - DNA, 1701 bp, Homo sapiens
ccgcatcctagccgccgactcacacaaggcaggtgggtgaggaaatccagagttgccatggagaaaattccagtgtcagcattcttgctccttgtggccctctcctacactctggccagagataccacagtcaaacctggagccaaaaaggacacaaaggactctcgacccaaactgccccagaccctctccagaggttggggtgaccaactcatctggactcagacatatgaagaagctctatataaatccaagacaagcaacaaacccttgatgattattcatcacttggatgagtgcccacacagtcaagctttaaagaaagtgtttgctgaaaataaagaaatccagaaattggcagagcagtttgtcctcctcaatctggtttatgaaacaactgacaaacacctttctcctgatggccagtatgtccccaggattatgtttgttgacccatctctgacagttagagccgatatcactggaagatattcaaatcgtctctatgcttacgaacctgcagatacagctctgttgcttgacaacatgaagaaagctctcaagttgctgaagactgaattgtaaagaaaaaaaatctccaagcccttctgtctgtcaggccttgagacttgaaaccagaagaagtgtgagaagactggctagtgtggaagcatagtgaacacactgattaggttatggtttaatgttacaacaactattttttaagaaaaacaagttttagaaatttggtttcaagtgtacatgtgtgaaaacaatattgtatactaccatagtgagccatgattttctaaaaaaaaaaataaatgttttgggggtgttctgttttctccaacttggtctttcacagtggttcgtttaccaaataggattaaacacacacaaaatgctcaaggaagggacaagacaaaaccaaaactagttcaaatgatgaagaccaaagaccaagttatcatctcaccacaccacaggttctcactagatgactgtaagtagacacgagcttaatcaacagaagtatcaagccatgtgctttagcataaaagaatatttagaaaaacatcccaagaaaatcacatcactacctagagtcaactctggccaggaactctaaggtacacactttcatttagtaattaaattttagtcagattttgcccaacctaatgctctcagggaaagcctctggcaagtagctttctccttcagaggtctaatttagtagaaaggtcatccaaagaacatctgcactcctgaacacaccctgaagaaatcctgggaattgaccttgtaatcgatttgtctgtcaaggtcctaaagtactggagtgaaataaattcagccaacatgtgactaattggaagaagagcaaagggtggtgacgtgttgatgaggcagatggagatcagaggttactagggtttaggaaacgtgaaaggctgtggcatcagggtaggggagcattctgcctaacagaaattagaattgtgtgttaatgtcttcactctatacttaatctcacattcattaatatatggaattcctctactgcccagcccctcctgatttctttggcccctggactatggtgctgtatataatgctttgcagtatctgttgcttgtcttgattaacttttttggataaaaccttttttgaacagaaaaaaaaaaaaaaaaaaaa

SEQ ID NO: 3 - DNA, 1093 bp, Homo sapiens
ctgcaaggcggcggcaggagaggttgtggtgctagtttctctaagccatccagtgccatcctcgtcgctgcagcgacaccgctctcgccgccgccatgactgagcagatgacccttcgtggcaccctcaagggccacaacggctgggtaacccagatcgctactaccccgcagttcccggacatgatcctctccgcctctcgagataagaccatcatcatgtggaaactgaccagggatgagaccaactatggaattccacagcgtgctctgcggggtcactcccactttgttagtgatgtggttatctcctcagatggccagtttgccctctcaggctcctgggatggaaccctgcgcctctgggatctcacaacgggcaccaccacgaggcgatttgtgggccataccaaggatgtgctgagtgtggccttctcctctgacaaccggcagattgtctctggatctcgagataaaaccatcaagctatggaataccctgggtgtgtgcaaatacactgtccaggatgagagccactcagagtgggtgtcttgtgtccgcttctcgcccaacagcagcaaccctatcatcgtctcctgtggctgggacaagctggtcaaggtatggaacctggctaactgcaagctgaagaccaaccacattggccacacaggctatctgaacacggtgactgtctctccagatggatccctctgtgcttctggaggcaaggatggccaggccatgttatgggatctcaacgaaggcaaacacctttacacgctagatggtggggacatcatcaacgccctgtgcttcagccctaaccgctactggctgtgtgctgccacaggccccagcatcaagatctgggatttagagggaaagatcattgtagatgaactgaagcaagaagttatcagtaccagcagcaaggcagaaccaccccagtgcacttccctggcctggtctgctgatggccagactctgtttgctggctacacggacaacctggtgcgagtgtggcaggtgaccattggcacacgctagaagtttatggcagagctttacaaataaaaaaaaaatggcttttc

SEQ ID NO: 4 - DNA, 971 bp, Homo sapiens
cactcgttgcataaatttgcgctccgccagcccggagcatttaggggcggttggctttgttgggtgagcttgtttgtgtccctgtgggtggacgtggttggtgattggcaggatcctggtatccgctaacaggtcaaaatgcagatcttcgtgaaaacccttaccggcaagaccatcacccttgaggtggagcccagtgacaccatcgaaaatgtgaaggccaagatccaggataaggaaggcattccccccgaccagcagaggctcatctttgcaggcaagcagctggaagatggccgtactctttctgactacaacatccagaaggagtcgaccctgcacctggtcctgcgtctgagaggtggtatgcagatcttcgtgaagaccctgaccggcaagaccatcaccctggaagtggagcccagtgacaccatcgaaaatgtgaaggccaagatccaggataaagaaggcatccctcccgaccagcagaggctcatctttgcaggcaagcagctggaagatggccgcactctttctgactacaacatccagaaggagtcgaccctgcacctggtcctgcgtctgagaggtggtatgcagatcttcgtgaagaccctgaccggcaagaccatcactctggaggtggagcccagtgacaccatcgaaaatgtgaaggccaagatccaagataaagaaggcatcccccccgaccagcagaggctcatctttgcaggcaagcagctggaagatggccgcactctttctgactacaacatccagaaagagtcgaccctgcacctggtcctgcgcctgaggggtggctgttaattcttcagtcatggcattcgcagtgcccagtgatggcattactctgcactatagccatttgccccaacttaagtttagaaattacaagtttcagtaatagctgaacctgttcaaaatgttaataaaggtttcgttgcatggta

SEQ ID NO: 5 - DNA, 753 bp, Homo sapiens
gttttgcagacgccaccgccgaggaaaaccgtgtactattagccatggtcaaccccaccgtgttcttcgacattgccgtcgacggcgagcccttgggccgcgtctcctttgagctgtttgcagacaaggtcccaaagacagcagaaaattttcgtgctctgagcactggagagaaaggatttggttataagggttcctgctttcacagaattattccagggtttatgtgtcagggtggtgacttcacacgccataatggcactggtggcaagtccatctatggggagaaatttgaagatgagaacttcatcctaaagcatacgggtcctggcatcttgtccatggcaaatgctggacccaacacaaatggttcccagtttttcatctgcactgccaagactgagtggttggatggcaagcatgtggtgtttggcaaagtgaaagaaggcatgaatattgtggaggccatggagcgctttgggtccaggaatggcaagaccagcaagaagatcaccattgctgactgtggacaactcgaataagtttgacttgtgttttatcttaaccaccagatcattccttctgtagctcaggagagcacccctccaccccatttgctcgcagtatcctagaatctttgtgctctcgctgcagttccctttgggttccatgttttccttgttccctcccatgcctagctggattgcagagttaagtttatgattatgaaataaaaactaaataacaattgtc

SEQ ID NO: 6 - DNA, 390 bp, Homo sapiens
atgtctggtcgcggcaaaggcggaaaaggcttggggaagggtggtgctaagcgccatcgtaaggtgctccgggataacatccagggcattacaaaaccggctattcgccgtttggctcggcgcggtggcgtcaagcgcatttccggtcttatctatgaggagactcgaggtgtgcttaaggttttcttagagaacgttattcgagacgccgtcacctatacggagcacgccaagcgcaaaactgtcacagccatggatgtagtatatgccctaaaacgtcaggggcgcactctgtatggcttcggcggctgaatctaagaatacgcggtctcctgagaacttcaaaaaacaaaaacaaaaaaacccaaaggcccttttcagggccgctca

SEQ ID NO: 7 - DNA, 3322 bp, Homo sapiens
gaaagctgtatttgctgcacgtggaaatctccgttattttccagcacccaacagtagcgtaatgggagtaacggacttaacctcatttctctttcagagcatttagccttcatatgcccttccctgcatgcttcccccaggccgtcaagacttgagttctgcctcgcttcccggcgcggtcgcagccctcagcccacttaggataatggcgacagctgaggtactgaacattggtaaaaaattatatgagggtaaaacaaaagaagtctacgaattgttagacagtccaggaaaagtcctcctgcagtccaaggaccagattacagcaggaaatgcagctagaaaaaaccacctggaaggaaaagctgcaatctcaaataaaatcaccagttgtatttttcagttattacaggaagcaggtattaaaactgccttcaccagaaaatgtggggagacagctttcattgcaccgcagtgtgaaatgattccaattgaatgggtttgcagaagaatagcaactggttcttttctcaaaagaaatcctggtgtcaaggaaggatataagttttacccacctaaagtggagttgtttttcaaggatgatgccaataatgacccacagtggtctgaggaacagctgattgctgcaaaattttgctttgctggacttcttataggccagactgaagtggatatcatgagtcatgctacacaggctatatttgaaatactggagaaatcctggttgccccagaattgtacactggttgatatgaagattgaatttggtgttgatgtaaccaccaaagaaattgttcttgctgatgttattgacaatgattcctggagactctggccatcaggagatcgaagccaacagaaagacaaacagtcttatcgggacctcaaagaagtaactcctgaagggctccaaatggtaaagaaaaactttgagtgggttgcagagagagtagagttgcttttgaaatcagaaagtcagtgcagggttgtagtgttgatgggctctacttctgatcttggtcactgtgaaaaaatcaagaaggcctgtggaaattttggcattccatgtgaacttcgagtaacatctgcgcataaaggaccagatgaaactctgaggattaaagctgagtatgaaggggatggcattcctactgtatttgtggcagtggcaggcagaagtaatggtttgggaccagtgatgtctgggaacactgcatatccagttatcagctgtcctcccctcacaccagactggggagttcaggatgtgtggtcttctcttcgactacccagtggtcttggctgttcaaccgtactttctccagaaggatcagctcaatttgctgctcagatatttgggttaagcaaccatttggtatggagcaaactgcgagcaagcattttgaacacatggatttccttgaagcaggctgacaagaaaatcagagaatgtaatttataagaaagaatgccattgaattttttaggggaaaaactacaaatttctaatttagctgaaggaaaatcaagcaagatgaaaaggtaattttaaattagagaacacaaataaaatgtattagtgaataaatgcttctctagatccatattaataaacatgagcatctaacccctcctttcttaggctagacaccaagatatttcagccagcctttatcattcctcttactttatcctttttccttaagtattggtggtcactactattgagtttcttccttaacactgattaaatgatcttaactccctcagctaaaactggcattactgactcccagctatatttctccagacttgcatttttttttttttttttgagacagggtctcactgtcgcccaggctggagtgcagtggcgtgatctcagttcactgctgctttccctcctgggctcaagcagttctcccacctcagcctctcgactaacagggactataatcttgcagcaccatgccgagctaattttattttttgtagagatgagctctcactatgtcacccaggttcgtctcaaactcctgaaccctagtaattctcctatctcagcctcccaaagtgctagggttacagacatgagccactgtgcctgtctagacttgtactttcaactgtccatttctccctgtctgtcccatgggcactcatgaaaaaacagaatgctcccaactttattcatcttccaagcctgtagctcttggtatactcactgttgcaagtcagaagcttgatttcatcattgatgtttttctcacgtttcacatctcactcatcaccaagtcatgttggtgttaatttctgattaacccttgaatttaccgtcttctcatcctctgtacaaaagcctcaagtgagggtcaaattcaacattatcctgatctagacagcccccattctcaatccacccttttccaagttgattgcccaaggacttctaacaataaactctcttttgcaccacagacttctttgaaaatatacatgctgttgaccctctctgtagaaaaccgcacacataaaacttaccaacagatttcattggttcttgggttctcccgaagcctatccatggtttatagattaagaattgatgaggtagctgggcacagtggctcacacctacgatcacagcacttcgggaggctgaagcaagcagatcacttgaggtcaggagtttgagaccagcctggccaacatggtgaaaccctgtctctactaaaaatacaaaaagtagccagccgtgatgacaggcacctgtaatcccagctactcgggaggctgaggcatgagaattgcttgaacccgggaggcggaggttgcagtgagcctggatcatgccactgcactccaacctgggcagcagagcaagactctgtctcaaaaggggaaaaaaaaaattgctgatgtgacccatgaagggaactcattttcctcgtaattttggactgccacacattggtacctttagttctctgaaggcccacgtttttatcattaagacctatttgttagctagtagagctttatgttcgctgtccatgaaaccttctgtaaccacagtgactacaagtagttctttctctattgaattattaggtccagaatagaagatgtcattgtacactttatttccctcacactgtgttatgctctgatgtgctatgcttagctatctgtcagagattagtaaattataaaactcatgtgtactacttaagtttatatcttatgctagtttataagaacaattaaaaggacttagaagattaaaaaaaaaaaaaaaaaa

SEQ ID NO: 8 - DNA, 2691 bp, Homo sapiens
gcttgcccgtcggtcgctagctcgctcggtgcgcgtcgtcccgctccatggcgctcttcgtgcggctgctggctctcgccctggctctggccctgggccccgccgcgaccctggcgggtcccgccaagtcgccctaccagctggtgctgcagcacagcaggctccggggccgccagcacggccccaacgtgtgtgctgtgcagaaggttattggcactaataggaagtacttcaccaactgcaagcagtggtaccaaaggaaaatctgtggcaaatcaacagtcatcagctacgagtgctgtcctggatatgaaaaggtccctggggagaagggctgtccagcagccctaccactctcaaacctttacgagaccctgggagtcgttggatccaccaccactcagctgtacacggaccgcacggagaagctgaggcctgagatggaggggcccggcagcttcaccatcttcgcccctagcaacgaggcctgggcctccttgccagctgaagtgctggactccctggtcagcaatgtcaacattgagctgctcaatgccctccgctaccatatggtgggcaggcgagtcctgactgatgagctgaaacacggcatgaccctcacctctatgtaccagaattccaacatccagatccaccactatcctaatgggattgtaactgtgaactgtgcccggctcctgaaagccgaccaccatgcaaccaacggggtggtgcacctcatcgataaggtcatctccaccatcaccaacaacatccagcagatcattgagatcgaggacacctttgagacccttcgggctgctgtggctgcatcagggctcaacacgatgcttgaaggtaacggccagtacacgcttttggccccgaccaatgaggccttcgagaagatccctagtgagactttgaaccgtatcctgggcgacccagaagccctgagagacctgctgaacaaccacatcttgaagtcagctatgtgtgctgaagccatcgttgcggggctgtctgtagagaccctggagggcacgacactggaggtgggctgcagcggggacatgctcactatcaacgggaaggcgatcatctccaataaagacatcctagccaccaacggggtgatccactacattgatgagctactcatcccagactcagccaagacactatttgaattggctgcagagtctgatgtgtccacagccattgaccttttcagacaagccggcctcggcaatcatctctctggaagtgagcggttgaccctcctggctcccctgaattctgtattcaaagatggaacccctccaattgatgcccatacaaggaatttgcttcggaaccacataattaaagaccagctggcctctaagtatctgtaccatggacagaccctggaaactctgggcggcaaaaaactgagagtttttgtttatcgtaatagcctctgcattgagaacagctgcatcgcggcccacgacaagagggggaggtacgggaccctgttcacgatggaccgggtgctgacccccccaatggggactgtcatggatgtcctgaagggagacaatcgctttagcatgctggtagctgccatccagtctgcaggactgacggagaccctcaaccgggaaggagtctacacagtctttgctcccacaaatgaagccttccgagccctgccaccaagagaacggagcagactcttgggagatgccaaggaacttgccaacatcctgaaataccacattggtgatgaaatcctggttagcggaggcatcggggccctggtgcggctaaagtctctccaaggtgacaagctggaagtcagcttgaaaaacaatgtggtgagtgtcaacaaggagcctgttgccgagcctgacatcatggccacaaatggcgtggtccatgtcatcaccaatgttctgcagcctccagccaacagacctcaggaaagaggggatgaacttgcagactctgcgcttgagatcttcaaacaagcatcagcgttttccagggcttcccagaggtctgtgcgactagcccctgtctatcaaaagttattagagaggatgaagcattagcttgaagcactacaggaggaatgcaccacggcagctctccgccaatttctctcagatttccacagagactgtttgaatgttttcaaaaccaagtatcacactttaatgtacatgggccgcaccataatgagatgtgagccttgtgcatgtgggggaggagggagagagatgtactttttaaatcatgttccccctaaacatggctgttaacccactgcatgcagaaacttggatgtcactgcctgacattcacttccagagaggacctatcccaaatgtggaattgactgcctatgccaagtccctggaaaaggagcttcagtattgtggggctcataaaacatgaatcaagcaatccagcctcatgggaagtcctggcacagtttttgtaaagcccttgcacagctggagaaatggcatcattataagctatgagttgaaatgttctgtcaaatgtgtctcacatctacacgtggcttggaggcttttatggggccctgtccaggtagaaaagaaatggtatgtagagcttagatttccctattgtgacagagccatggtgtgtttgtaataataaaaccaaagaaacata

SEQ ID NO: 9 - DNA, 1985 bp, Homo sapiens
tactgactttcagcaccaacttgtggtcccaggtaagtttccacgctggtactttagccctgggctcgaacctgcggacacgctgtggctgcaactccccgcccgccagacctcagtacgcagcgcggctggtgagaaacataatgcactctgacttccacgcgtggaatggggagatggactgcacggcgggcggacctgctcgggctgatggacggcaggtggactgatgtgcgcagggactggcggcagcgcggtcagagccagtcagccaaagccaggccagcacaatagactgtcccggttcccgccaggaggcggccgagcaccaactgtacggtactgcgcctgcgccgcgaccgccaacgcgcccagtctacgcttgcgcggcgcaacagggccgactgcagctggaagatggcggcgtccgtggtctgtcgggccgctaccgccggggcacaagtgctattgcgcgcccgccgctcgccggccctgctgcggacgccagccttgcggagtacggcaaccttcgctcaggcgctccagttcgtgccggagacgcaggttagcctgctggacaacggcctgcgtgtggcctccgagcagtcctctcagcccacttgcacggtgggagtgtggattgatgttggcagccgttttgagactgagaagaataatggggcaggctactttttggagcatctggctttcaagggaacaaagaatcggcctggcagtgccctggagaaggaggtggagagcatgggggcccatcttaatgcctacagcacccgggagcacacagcttactacatcaaggcgctgtccaaggatctgccgaaagctgtggagctcctgggtgacattgtgcagaactgtagtctggaagactcacagattgagaaggaacgtgatgtgatcctgcgggagatgcaggagaatgatgcatctatgcgagatgtggtctttaactacctgcatgccacagcattccagggcacacctctagcccaggctgtggaggggcccagtgagaatgtcaggaagctgtctcgtgcagacttgaccgagtacctcagcacacattacaaggcccctcgaatggtgctggcagcagctggaggagtggagcaccagcaactgttagacctcgcccagaagcacctcggtggcatcccatggacatatgcagaggacgctgtgcccactcttactccatgccgcttcactggcagtgagatccgccaccgtgatgatgctctaccttttgcccacgtggccattgcagtagagggtcctggctgggccagcccggacagtgtggccttgcaagtggccaatgccatcatcggccactatgactgcacttatggtggtggcgtgcacctgtccagcccactggcttcaggtgctgtggccaacaagctatgccagagtttccagaccttcagcatctgctatgcagagacgggcttgctgggtgcacactttgtctgtgaccgaatgaaaatcgatgacatgatgttcgtcctgcaagggcagtggatgcgcctgtgtaccagtgccacggagagtgaggtggcccggggcaaaaacatcctcagaaatgccctggtatctcatctagatggcactactcctgtgtgtgaggacatcggacgcagcctcctgacctatggccgccgcatccccctggctgaatgggaaagccggattgcggaggtggatgccagtgtggtacgtgagatctgctccaagtacatctatgaccagtgcccagcagtggctggatatggccccattgagcagctcccagactacaaccggatccgtagcggcatgttctggctgcgcttctaggcgggaagcctatgtaagcaagagggcagggccggggtttgtggtcccccccccaccacaaacacagcacttcggctcctctaacctgtgccacaggtgaccaccaataaaatcctctgctgaga

SEQ ID NO: 10 - DNA, 5489 bp, Homo sapiens
ggctgagttttatgacgggcccggtgctgaagggcagggaacaacttgatggtgctactttgaactgcttttcttttctcctttttgcacaaagagtctcatgtctgatatttagacatgatgagctttgtgcaaaaggggagctggctacttctcgctctgcttcatcccactattattttggcacaacaggaagctgttgaaggaggatgttcccatcttggtcagtcctatgcggatagagatgtctggaagccagaaccatgccaaatatgtgtctgtgactcaggatccgttctctgcgatgacataatatgtgacgatcaagaattagactgccccaacccagaaattccatttggagaatgttgtgcagtttgcccacagcctccaactgctcctactcgccctcctaatggtcaaggacctcaaggccccaagggagatccaggccctcctggtattcctgggagaaatggtgaccctggtattccaggacaaccagggtcccctggttctcctggcccccctggaatctgtgaatcatgccctactggtcctcagaactattctccccagtatgattcatatgatgtcaagtctggagtagcagtaggaggactcgcaggctatcctggaccagctggccccccaggccctcccggtccccctggtacatctggtcatcctggttcccctggatctccaggataccaaggaccccctggtgaacctgggcaagctggtccttcaggccctccaggacctcctggtgctataggtccatctggtcctgctggaaaagatggagaatcaggtagacccggacgacctggagagcgaggattgcctggacctccaggtatcaaaggtccagctgggatacctggattccctggtatgaaaggacacagaggcttcgatggacgaaatggagaaaagggtgaaacaggtgctcctggattaaagggtgaaaatggtcttccaggcgaaaatggagctcctggacccatgggtccaagaggggctcctggtgagcgaggacggccaggacttcctggggctgcaggtgctcggggtaatgacggtgctcgaggcagtgatggtcaaccaggccctcctggtcctcctggaactgccggattccctggatcccctggtgctaagggtgaagttggacctgcagggtctcctggttcaaatggtgcccctggacaaagaggagaacctggacctcagggacacgctggtgctcaaggtcctcctggccctcctgggattaatggtagtcctggtggtaaaggcgaaatgggtcccgctggcattcctggagctcctggactgatgggagcccggggtcctccaggaccagccggtgctaatggtgctcctggactgcgaggtggtgcaggtgagcctggtaagaatggtgccaaaggagagcccggaccacgtggtgaacgcggtgaggctggtattccaggtgttccaggagctaaaggcgaagatggcaaggatggatcacctggagaacctggtgcaaatgggcttccaggagctgcaggagaaaggggtgcccctgggttccgaggacctgctggaccaaatggcatcccaggagaaaagggtcctgctggagagcgtggtgctccaggccctgcagggcccagaggagctgctggagaacctggcagagatggcgtccctggaggtccaggaatgaggggcatgcccggaagtccaggaggaccaggaagtgatgggaaaccagggcctcccggaagtcaaggagaaagtggtcgaccaggtcctcctgggccatctggtccccgaggtcagcctggtgtcatgggcttccccggtcctaaaggaaatgatggtgctcctggtaagaatggagaacgaggtggccctggaggacctggccctcagggtcctcctggaaagaatggtgaaactggacctcaaggacccccagggcctactgggcctggtggtgacaaaggagacacaggaccccctggtccacaaggattacaaggcttgcctggtacaggtggtcctccaggagaaaatggaaaacctggggaaccaggtccaaagggtgatgccggtgcacctggagctccaggaggcaagggtgatgctggtgcccctggtgaacgtggacctcctggattggcaggggccccaggacttagaggtggagctggtccccctggtcccgaaggaggaaagggtgctgctggtcctcctgggccacctggtgctgctggtactcctggtctgcaaggaatgcctggagaaagaggaggtcttggaagtcctggtccaaagggtgacaagggtgaaccaggcggcccaggtgctgatggtgtcccagggaaagatggcccaaggggtcctactggtcctattggtcctcctggcccagctggccagcctggagataagggtgaaggtggtgcccccggacttccaggtatagctggacctcgtggtagccctggtgagagaggtgaaactggccctccaggacctgctggtttccctggtgctcctggacagaatggtgaacctggtggtaaaggagaaagaggggctccgggtgagaaaggtgaaggaggccctcctggagttgcaggaccccctggaggttctggacctgctggtcctcctggtccccaaggtgtcaaaggtgaacgtggcagtcctggtggacctggtgctgctggcttccctggtgctcgtggtcttcctggtcctcctggtagtaatggtaacccaggacccccaggtcccagcggttctccaggcaaggatgggcccccaggtcctgcgggtaacactggtgctcctggcagccctggagtgtctggaccaaaaggtgatgctggccaaccaggagagaagggatcgcctggtgcccagggcccaccaggagctccaggcccacttgggattgctgggatcactggagcacggggtcttgcaggaccaccaggcatgccaggtcctaggggaagccctggccctcagggtgtcaagggtgaaagtgggaaaccaggagctaacggtctcagtggagaacgtggtccccctggaccccagggtcttcctggtctggctggtacagctggtgaacctggaagagatggaaaccctggatcagatggtcttccaggccgagatggatctcctggtggcaagggtgatcgtggtgaaaatggctctcctggtgcccctggcgctcctggtcatccaggcccacctggtcctgtcggtccagctggaaagagtggtgacagaggagaaagtggccctgctggccctgctggtgctcccggtcctgctggttcccgaggtgctcctggtcctcaaggcccacgtggtgacaaaggtgaaacaggtgaacgtggagctgctggcatcaaaggacatcgaggattccctggtaatccaggtgccccaggttctccaggccctgctggtcagcagggtgcaatcggcagtccaggacctgcaggccccagaggacctgttggacccagtggacctcctggcaaagatggaaccagtggacatccaggtcccattggaccaccagggcctcgaggtaacagaggtgaaagaggatctgagggctccccaggccacccagggcaaccaggccctcctggacctcctggtgcccctggtccttgctgtggtggtgttggagccgctgccattgctgggattggaggtgaaaaagctggcggttttgccccgtattatggagatgaaccaatggatttcaaaatcaacaccgatgagattatgacttcactcaagtctgttaatggacaaatagaaagcctcattagtcctgatggttctcgtaaaaaccccgctagaaactgcagagacctgaaattctgccatcctgaactcaagagtggagaatactgggttgaccctaaccaaggatgcaaattggatgctatcaaggtattctgtaatatggaaactggggaaacatgcataagtgccaatcctttgaatgttccacggaaacactggtggacagattctagtgctgagaagaaacacgtttggtttggagagtccatggatggtggttttcagtttagctacggcaatcctgaacttcctgaagatgtccttgatgtgcagctggcattccttcgacttctctccagccgagcttcccagaacatcacatatcactgcaaaaatagcattgcatacatggatcaggccagtggaaatgtaaagaaggccctgaagctgatggggtcaaatgaaggtgaattcaaggctgaaggaaatagcaaattcacctacacagttctggaggatggttgcacgaaacacactggggaatggagcaaaacagtctttgaatatcgaacacgcaaggctgtgagactacctattgtagatattgcaccctatgacattggtggtcctgatcaagaatttggtgtggacgttggccctgtttgctttttataaaccaaactctatctgaaatcccaacaaaaaaaatttaactccatatgtgttcctcttgttctaatcttgtcaaccagtgcaagtgaccgacaaaattccagttatttatttccaaaatgtttggaaacagtataatttgacaaagaaaaatgatacttctctttttttgctgttccaccaaatacaattcaaatgctttttgttttatttttttaccaattccaatttcaaaatgtctcaatggtgctataataaataaacttcaacactctttatgataacaacactgtgttatattctttgaatcctagcccatctgcagagcaatgactgtgctcaccagtaaaagataacctttctttctgaaatagtcaaatacgaaattagaaaagccctccctattttaactacctcaactggtcagaaacacagattgtattctatgagtcccagaagatgaaaaaaattttatacgttgataaaacttataaatttcattgattaatctcctggaagattggtttaaaaagaaaagtgtaatgcaagaatttaaagaaatatttttaaagccacaattattttaatattggatatcaactgcttgtaaaggtgctcctcttttttcttgtcattgctggtcaagattactaatatttgggaaggctttaaagacgcatgttatggtgctaatgtactttcacttttaaactctagatcagaattgttgacttgcattcagaacataaatgcacaaaatctgtacatgtctcccatcagaaagattcattggcatgccacagggattctcctccttcatcctgtaaaggtcaacaataaaaaccaaattatggggctgcttttgtcacactagcatagagaatgtgttgaaatttaactttgtaagcttgtatgtggttgttgatcttttttttccttacagacacccataataaaatatcatattaaaattc

SEQ ID NO: 11 - DNA, 1339 bp, Homo sapiens
gaattccgattagtgtgatctcagctcaaggcaaaggtgggatatcatggcatctatctgggttggacaccgaggaacagtaagagattatccagactttagcccatcagtggatgctgaagctattcagaaagcaatcagaggaattggaactgatgagaaaatgctcatcagcattctgactgagaggtcaaatgcacagcggcagctgattgttaaggaatatcaagcagcatatggaaaggagctgaaagatgacttgaagggtgatctctctggccactttgagcatctcatggtggccctagtgactccaccagcagtctttgatgcaaagcagctaaagaaatccatgaagggcgcgggaacaaacgaagatgccttgattgaaatcttaactaccaggacaagcaggcaaatgaaggatatctctcaagcctattatacagtatacaagaagagtcttggagatgacattagttccgaaacatctggtgacttccggaaagctctgttgactttggcagatggcagaagagatgaaagtctgaaagtggatgagcatctggccaaacaagatgcccagattctctataaagctggtgagaacagatggggcacggatgaagacaaattcactgagatcctgtgtttaaggagctttcctcaattaaaactaacatttgatgaatacagaaatatcagccaaaaggacattgtggacagcataaaaggagaattatctgggcattttgaagacttactgttggccatagttaattgtgtgaggaacacgccggcctttttagccgaaagactgcatcgagccttgaagggtattggaactgatgagtttactctgaaccgaataatggtgtccagatcagaaattgaccttttggacattcgaacagagttcaagaagcattatggctattccctatattcagcaattaaatcggatacttctggagactatgaaatcacactcttaaaaatctgtggtggagatgactgaaccaagaagataatctccaaaggtccacgatgggctttcccaacagctccaccttacttcttctcatactatttaagagaacaagcaaatataaacagcaacttgtgttcctaacaggaattttcattgttctataacaacaacaacaaaagcgattattattttagagcatctcatttataatgtagcagctcataaatgaaattgaaaatggtattaaagatctgcaactactatccaacttatatttctgctttcaaagttaagaatctttatagttctactccattaaatataaagcaagataataaaacggaattc

SEQ ID NO: 12 - DNA, 3871 bp, Homo sapiens
ctactgttgtttttgaggggcgggcagccgcgccgccgcggcacttttttaattttttcgggtgccgcagcagcgacccctcggcgccgatgtccctgatccctggagcgacgacggccgctgcctaagctgggaagaggaatgccagctcctgagcaggcctcattggtggaggaggggcaaccacagacccgccaggaagctgcctccactggcccaggcatggaacccgagaccacagccaccactattctagcatccgtgaaggagcaggagcttcagtttcagcgactcacccgagaactggaagtggaaaggcagattgttgccagtcagctagaaagatgtaggcttggagcagaatcaccaagcatcgccagcaccagctcaactgagaagtcatttccttggagatcaacagacgtgccaaatactggtgtaagcaaacctagagtttctgacgctgtccagcccaacaactatctcatcaggacagagccagaacaaggaaccctctattcaccagaacagacatctctccatgaaagtgagggatcattgggtaactcaagaagttcaacacaaatgaattcttattccgacagtggataccaggaagcagggagtttccacaacagccagaacgtgagcaaggcagacaacagacagcagcattcattcataggatcaactaacaaccatgtggtgaggaattcaagagctgaaggacaaacactggttcagccatcagtagccaatcgggccatgagaagagttagttcagttccatctagagcacagtctccttcttatgttatcagcacaggcgtgtctccttcaagggggtctctgagaacttctctgggtagtggatttggctctccgtcagtgaccgacccccgacctctgaaccccagtgcatattcctccaccacattacctgctgcacgggcagcctctccgtactcacagagacccgcctccccaacagctatacggcggattgggtcagtcacctcccggcagacctccaatcccaacggaccaacccctcaataccaaaccaccgccagagtggggtccccactgaccctgacggatgcacagactcgagtagcttccccatcccaaggccaggtggggtcgtcgtcccccaaacgctcagggatgaccgccgtaccacagcatctgggaccttcactgcaaaggactgttcatgacatggagcaattcggacagcagcagtatgacatttatgagaggatggttccacccaggccagacagcctgacaggcttacggagttcctatgctagtcagcatagtcagcttgggcaagaccttcgttctgccgtgtctcccgacttgcacattactcctatatatgaggggaggacctattacagcccagtgtaccgcagcccaaaccatggaactgtggagctccaaggatcgcagacggcgttgtatcgcacaggtgtatcaggtattggaaatctacaaaggacatccagccaacgaagtacccttacataccaaagaaataattatgctctgaacacaacagctacctacgcggagccctacaggcctatacaataccgagtgcaagagtgcaattataacaggcttcagcatgcagtgccggctgatgatggcaccacaagatccccatcaatagacagcattcagaaggaccccagggagtttgcctggcgtgatcctgagttgcctgaggtcattcacatgcttgagcaccagttcccatctgttcaggcaaatgcagcggcctacctgcagcacctgtgctttggtgacaacaaagtgaagatggaggtgtgtaggttagggggaatcaagcatctggttgaccttctggaccacagagttttggaagttcagaagaatgcttgtggtgcccttcgaaacctcgtttttggcaagtctacagatgaaaataaaatagcaatgaagaatgttggtgggatacctgccttgttgcgactgttgagaaaatctattgatgcagaagtaagggagcttgttacaggagttctttggaatttatcctcatgtgatgctgtaaaaatgacaatcattcgagatgctctctcaaccttaacaaacactgtgattgttccacattctggatggaataactcttcttttgatgatgatcataaaattaaatttcagacttcactagttctgcgtaacacgacaggttgcctaaggaacctcacgtccgcgggggaagaagctcggaagcaaatgcggtcctgcgaggggctggtagactcactgttgtatgtgatccacacgtgtgtgaacacatccgattacgacagcaagacggtggagaactgcgtgtgcaccctgaggaacctgtcctatcggctggagctggaggtgccccaggcccggttactgggactgaacgaattggatgacttactaggaaaagagtctcccagcaaagactctgagccaagttgctgggggaagaagaagaaaaagaaaaagaggactccgcaagaagatcaatgggatggagttggtcctatcccaggactgtcgaagtcccccaaaggggttgagatgctgtggcacccatcggtggtaaaaccatatctgactcttctagcagaaagttccaacccagccaccttggaaggctctgcagggtctctccagaacctctctgctagcaactggaagtttgcagcatatatccggggcggccgtccgaaaagaaaagggctccccatccttgtggagcttctgagaatggataacgatagagttgtttcttccggtgcaacagccttgaggaatatggcactagatgttcgcaacaaggagctcataggcaaatacgccatgcgagacctggtcaaccggctccccggcggcaatggccccagtgtcttgtctgatgagaccatggcagccatctgctgtgctctgcacgaggtcaccagcaaaaacatggagaacgcaaaagccctggccgactcaggaggcatagagaagctggtgaacataaccaaaggcaggggcgacagatcatctctgaaagtggtgaaggcagcagcccaggtcttgaatacattatggcaatatcgggacctccggagcatttataaaaaggatgggtggaatcagaaccattttattacacctgtgtcgacattggagcgagaccgattcaaatcacatccttccttgtctaccaccaaccaacagatgtcacccatcattcagtcagtcggcagcacctcttcctcaccagcactgttaggaatcagagaccctcgctctgaatacgataggacccagccacctatgcagtattacaatagccaaggggatgccacacataaaggcctgtaccctggctccagcaaaccttcaccaatttacatcagttcctattcctcaccagcaagagaacaaaatagacggctacagcatcaacagctgtattatagtcaagatgactccaacagaaagaactttgatgcatacagattgtatttgcagtctcctcatagctatgaagatccttattttgatgaccgagttcactttccagcttctactgattactcaacacagtatggactgaaatcgaccacaaattatgtagacttttattccactaaacgaccttcttatagagcagaacagtacccagggtccccagactcatgggtgtacgatcaagatgcccaacagaggaactctttctttctaaccttgttcagattgaggtgaaaagtccatcttgctgatttcatgattgaaatgtgaaagtgaagtggaaggaatgaatgaagtgtgtttttttttcctttttgaggaattatca

SEQ ID NO: 13 - DNA, 1268 bp, Homo sapiens
ggcattaatcaatccctgtttctattttaataggggggacaaggtaggggagagggaaaaacagttttggatataactatttggaaggagagtagacatgaagagggcaaaccctagcttttcattatctacaatcaatagtttgtttttcttttttaaaaaagaaagaaaaaccctttcaatcttcaatactctttaaaagcccacttcttagctactggccaatccacaccaattatttaaattcacttggtacacacctttgtccactgggtaaattatattcattatgcccactgctgcagcacgcataaaccaacacccctgcatggctgaacagggcctaatctaggactgatgggagaagggcttgcaaaccaagatcaaggtgtttctccgctaatactgtctaccaagctgatccctacaaaaatgcatataaaagcaggcaagtttagctactgtgttgcaagagaaaccaggaccttgttaaatagttctctccattaccatttattctctcaagggaagcttaaaaaaacaacaacaacaaaacaacacattggtctggccacctcatgaatccaacaagcattagtgtggcatttcagtggagaaggaaacttggggggaaaaatcccatcaaggttgtaagaaaggctcccaatttaactgtccctgtccctatttatccatcatccaagaccatccattattctagagcactctgatcaataaaaggggtccaagcatcaggagcaggcaaggagaaccaaaagacatcaagaaaccgatttgcttgagaaaagcagcgattcttcctttcagagttctccatggctgagaaaatgcccaagacatcatgtatgtgacttagatactgctttttgggaggttaagagtagcatgaagaacttaagatgatgataagagtctaaatttttagtttcaaggtttcaatagaatgtggatatattcaaaactttcaaaaaggacagtgtttagaaagggtaaaactaggacacagaaaacactgggaattaccacgacccccaagtgcttccggctccaggaaataaccattcatgtgtttgctggaggtcacacaattttcccctattacctggtgcaaaatgactcatcacttcccaaaagcttcttttcaaaccacgattttcccatttattttggtccaatgcagtcccattctttatggcctatagtctcactcccaactacccccctggggggttaaaaaaaaaaaaaaa

SEQ ID NO: 14 - DNA, 2239 bp, Homo sapiens
aagcttgcacgaggccttcccggcggctgattcgagggcttgtttggtcagaaggggggcgtcagagaagctgccccttagccaaccatgccgtctgagggtcgctgctgggagaccttgaaggccctacgcagttccgacaaaggtcgcctttgctactaccgcgactggctgctgcggcgcgaggatgttttagaagaatgtatgtctcttcccaagctatcttcttattctggatgggtggtagagcacgtcctaccccatatgcaggagaaccaacctctgtctgagacttcgccatcctctacgtcagcttcagccctagatcaaccctcatttgttcccaaatctcctgacgcaagctctgccttttccccagcctcccctgcaacaccaaatggaaccaagggcaaagatgagtcccagcacacagaatctatggtacttcagtcctcacgggggatcaaagtggaaggctgcgtccgaatgtacgaactggtacacagaatgaaaggaacagagggcctgaggctatggcaggaggagcaggagaggaaggtgcaagccctctcggagatggcatctgaacaactgaagcggtttgatgaatggaaggaactgaagcagcataaagaattccaggacttgcgggaagtaatggagaagagctccagagaagccttgggacaccaagagaagttaaaagctgagcaccgtcacagagcaaagattctcaacctgaagctgcgggaagcagagcagcagcgcgtgaagcaagcagaacaggagcggcttcggaaggaagaaggccagatccgcctgcgggccctctatgctctgcaggaggagatgctgcagctcagccagcagctggatgcctctgagcagcacaaagccctgcttaaggtcgacctggctgccttccagacccgaggcaaccagctgtgcagcctcatctcagggatcatccgggcctcttcagagagcagctatcccacagcagagagtcaagctgaggctgagcgagctctgcgggaaatgcgggacctcctgatgaacttggggcaggagatcaccagagcctgcgaagacaagaggaggcaggatgaagaagaggcccaggtaaagctgcaagaggcacagatgcagcagggaccagaggcccacaaagagcccccagctcccagccagggcccaggagggaaacagaatgaagacctccaggtgaaggtacaagacattacaatgcagtggtaccagcagctgcaggatgcttccatgcagtgtgtgttgacctttgagggcctgaccaacagcaaggacagtcaggccaaaaagataaagatggacctccagaaggctgctaccatcccagtgagccaaatctctaccattgcaggctcaaaactgaaggagatctttgacaagatccacagcctgctctctggaaaacctgttcaatctggtgggcgctctgtgtctgtcacacttaacccacaggggctggactttgttcaatacaaactggcagagaaatttgtgaaacaaggcgaggaggaagtggcctctcaccatgaagcagcattccccattgcagttgtggcatccgggatctgggagctccaccccagagtgggggacctcattcttgctcatctacataagaagtgtccttactctgttcctttctatcccactttcaaggagggaatggctttggaagactatcagaggatgcttggttaccaagtaaaggattccaaagtggagcagcaagacaactttctaaaacgcatgtcagggatgatccgtctctacgctgctatcatccagctccggtggccatatggaaaccgacaggagattcaccctcatggcttaaatcatggatggcgctggttggcacagatcttaaacatggagcccttgtcagatgtgacagccaccctcctctttgacttcctggaggtgtgtgggaatgccctcatgaagcaataccaggttcagttctggaagatgctaattctcatcaaagaggactactttcccaggtatcaggcttgttgagcagacagcaggggattaagtaactcataaccaggcctcagatacccaagggtgctattacctgctggttttgattcaagttaaaaacacctgtactaagtatgacatctttcctactccagtccctctcgttgatatttgaataaatgcttttgaaccttaaaaaaaaaaa

SEQ ID NO: 15 - DNA, 1965 bp, Homo sapiens
gtctggttctctctctccagaaggttctgccggttcccccagctctgggtacccggctctgcatcgcgtcgccatgatgggccatcgtccagtgctcgtgctcagccagaacacaaagcgtgaatccggaagaaaagttcaatctggaaacatcaatgctgccaagactattgcagatatcatccgaacatgtttgggacccaagtccatgatgaagatgcttttggacccaatgggaggcattgtgatgaccaatgatggcaatgccattcttcgagagattcaagtccagcatccagcggccaagtccatgatcgaaattagccggacccaggatgaagaggttggagatgggaccacatcagtaattattcttgcaggggaaatgctgtctgtagctgagcacttcctggagcagcagatgcacccaacagtggtgatcagtgcttaccgcaaggcattggatgatatgatcagcaccctaaagaaaataagtatcccagtcgacatcagtgacagtgatatgatgctgaacatcatcaacagctctattactaccaaagccatcagtcggtggtcatctttggcttgcaacattgccctggatgctgtcaagatggtacagtttgaggagaatggtcggaaagagattgacataaaaaaatatgcaagagtggaaaagatacctggaggcatcattgaagactcctgtgtcttgcgtggagtcatgattaacaaggatgtgacccatccacgtatgcggcgctatatcaagaaccctcgcattgtgctgctggattcttctctggaatacaagaaaggagaaagccagactgacattgagattacacgagaggaggacttcacccgaattctccagatggaggaagagtacatccagcagctctgtgaggacattatccaactgaagcccgatgtggtcatcactgaaaagggcatctcagatttagctcagcactaccttatgcgggccaatatcacagccatccgcagagtccggaagacagacaataatcgcattgctagagcctgtggggcccggatagtcagccgaccagaggaactgagagaagatgatgttggaacaggagcaggcctgttggaaatcaagaaaattggagatgaatactttactttcatcactgactgcaaagaccccaaggcctgcaccattctcctccggggggctagcaaagagattctctcggaagtagaacgcaacctccaggatgccatgcaagtgtgtcgcaatgttctcctggaccctcagctggtgccagggggtggggcctccgagatggctgtggcccatgccttgacagaaaaatccaaggccatgactggtgtggaacaatggccatacagggctgttgcccaggccctagaggtcattcctcgtaccctgatccagaactgtggggccagcaccatccgtctacttacctcccttcgggccaagcacacccaggagaactgtgagacctggggtgtaaatggtgagacgggtactttggtggacatgaaggaactgggcatatgggagccattggctgtgaagctgcagacttataagacagcagtggagacggcagttctgctactgcgaattgatgacatcgtttcaggccacaaaaagaaaggcgatgaccagagccggcaaggcggggctcctgatgctggccaggagtgagtgctaggcaaggctacttcaatgcacagaaccagcagagtctccccttttcctgagccagagtgccaggaacactgtggacgtctttgttcagaagggatcaggttggggggcagcccccagtccctttctgtcccagctcagttttccaaaagacactgacatgtaattcttctctattgtaaggtttccatttagtttgcttccgatgattaaatctaagtcatttgaaaaaaaaaaaaaaaaaaaaaaaa

SEQ ID NO: 16 - DNA, 767 bp, Homo sapiens
tctcgctcaggctcggttttaccccggagtctattcgaagggggctgctacgtcagcgcgtctcagcgtaagacggcgctattccgctgtaacagcttccggcgggtcctggatgttgatgtcctgcatctaacgcggtgtaacccccgaagccgagcgagctccggaggaatttcagtatctgctacggtaacttcatcagcccgccaagatggcgatgcaagcggccaagagggcgaacattcgacttccacctgaagtaaatcggatattgtatataagaaatttgccatacaaaatcacagctgaagaaatgtatgatatatttgggaaatatggacctattcgtcaaatcagagtggggaacacacctgaaactagaggaacagcttatgtggtctatgaggacatctttgatgccaagaatgcatgtgatcacctatcgggattcaatgtttgtaacagataccttgtggttttgtactataatgccaacagggcatttcagaagatggacacaaagaagaaggaggaacagttgaagcttctcaaggagaaatatggcatcaacacagatccaccaaaataaatgttttctacattttcatttggactaaatcccacgaatgacaactaccacctttttttcctttttaattaatactaaatattgtgatttcttatttgaggttcaaaatgacctgcttgaaactttgatacatattggaatacattatgttaataaacttgtagctttttgtgaaaca

SEQ ID NO: 17 - DNA, 1837 bp, Homo sapiens
tttttcgcaacgggtttgccgccagaacacaggtgtcgtgaaaactacccctaaaagccaaaatgggaaaggaaaagactcatatcaacattgtcgtcattggacacgtagattcgggcaagtccaccactactggccatctgatctataaatgcggtggcatcgacaaaagaaccattgaaaaatttgagaaggaggctgctgagatgggaaagggctccttcaagtatgcctgggtcttggataaactgaaagctgagcgtgaacgtggtatcaccattgatatctccttgtggaaatttgagaccagcaagtactatgtgactatcattgatgccccaggacacagagactttatcaaaaacatgattacagggacatctcaggctgactgtgctgtcctgattgttgctgctggtgttggtgaatttgaagctggtatctccaagaatgggcagacccgagagcatgcccttctggcttacacactgggtgtgaaacaactaattgtcggtgttaacaaaatggattccactgagccaccctacagccagaagagatatgaggaaattgttaaggaagtcagcacttacattaagaaaattggctacaaccccgacacagtagcatttgtgccaatttctggttggaatggtgacaacatgctggagccaagtgctaacatgccttggttcaagggatggaaagtcacccgtaaggatggcaatgccagtggaaccacgctgcttgaggctctggactgcatcctaccaccaactcgtccaactgacaagcccttgcgcctgcctctccaggatgtctacaaaattggtggtattggtactgttcctgttggccgagtggagactggtgttctcaaacccggtatggtggtcacctttgctccagtcaacgttacaacggaagtaaaatctgtcgaaatgcaccatgaagctttgagtgaagctcttcctggggacaatgtgggcttcaatgtcaagaatgtgtctgtcaaggatgttcgtcgtggcaacgttgctggtgacagcaaaaatgacccaccaatggaagcagctggcttcactgctcaggtgattatcctgaaccatccaggccaaataagcgccggctatgcccctgtattggattgccacacggctcacattgcatgcaagtttgctgagctgaaggaaaagattgatcgccgttctggtaaaaagctggaagatggccctaaattcttgaagtctggtgatgctgccattgttgatatggttcctggcaagcccatgtgtgttgagagcttctcagactatccacctttgggtcgctttgctgttcgtgatatgagacagacagttgcggtgggtgtcatcaaagcagtggacaagaaggctgctggagctggcaaggtcaccaagtctgcccagaaagctcagaaggctaaatgaatattatccctaatacctgccaccccactcttaatcagtggtggaagaacggtctcagaactgtttgtttcaattggccatttaagtttagtagtaaaagactggttaatgataacaatgcatcgtaaaaccttcagaaggaaaggagaatgttttgtggaccactttggttttcttttttgcgtgtggcagttttaagttattagtttttaaaatcagtactttttaatggaaacaacttgaccaaaaatttgtcacagaattttgagacccattaaaaaagttaaatgagaaaaaaaaaaaaaaaaaaaaaaaaaaaaaaaaaaaaaaaaaaaaaaaaaaaaaaaaaaaaaaaaaaaaaaaaaaaaaaaaaaaaaaaaaaaaaa

SEQ ID NO: 18 - DNA, 1402 bp, Homo sapiens
ctcgcgtcacagccgggatgaagccgatcctactgcagggccatgagcggtccattacgcagattaagtataaccgcgaaggagacctcctctttactgtggccaaggaccctatcgtcaatgtatggtactctgtgaatggtgagaggctgggcacctacatgggccataccggagctgtgtggtgtgtggacgctgactgggacaccaagcatgtcctcactggctcagctgacaacagctgtcgtctctgggactgtgaaacaggaaagcagctggcccttctcaagaccaattcggctgtccggacctgcggttttgactttgggggcaacatcatcatgttctccacggacaagcagatgggctaccagtgctttgtgagcttttttgacctgcgggatccgagccagattgacaacaatgagccctacatgaagatcccttgcaatgactctaaaatcaccagtgctgtttggggacccctgggggagtgcatcatcgctggccatgagagtggagagctcaaccagtatagtgccaagtctggagaggtgttggtgaatgttaaggagcactcccggcagatcaacgacatccagttatccagggacatgaccatgtttgtgaccgcgtccaaggacaacacagccaagctttttgactccacaactcttgaacatcagaagactttccggacagaacgtcctgtcaactcagctgccctctcccccaactatgaccatgtggtcctgggcggtggtcaggaagccatggatgtaaccacaacctccaccaggattggcaagtttgaggccaggttcttccatttggcctttgaagaagagtttggaagagtcaagggtcactttggacctatcaacagtgttgccttccatcctgatggcaagagctacagcagcggcggcgaagatggttacgtccgtatccattacttcgacccacagtactttgaatttgagtttgaggcttaagaagctggatctcctgccgggcgtggttggctcatgcctgtaatcccaccactttttttttaaggcaggcggatcacctgaggtcaggagtttaagaccagcctgaccaacatggagaaacctcgtctctactaaaaatacaaaaattagccaggcatggtggcacacgcctatagtcccagctactcaggaggctgaggcaggagaatcacttgaacccaggaggcagaggttgcagtgagctgagatcacgtcattgcactccatcctgagccacaagagcaaaactccgtctcaaaaaaaaaaaagaagaaggtggatctccaaccaggccagagaagattctcacagaaggttttgaactctaagaaataaattggtttggtaataaatggcttctggtcaga

SEQ ID NO: 19 - DNA, 1360 bp, Homo sapiens
gagctgccgtagcggacccagcacagccaggagcgtccgggatgagctcagccgcggccgaccactgggcgtggttgctggtgctcagcttcgtgtttggatgcaatgttcttaggatcctcctcccgtccttctcatccttcatgtccagggtgctgcagaaggacgcggagcaggagtcacagatgagagcggagatccaggacatgaagcaggagctctccacagtcaacatgatggacgagtttgccagatatgccaggctggaaagaaagatcaacaagatgacggataagctcaaaacccatgtgaaagctcggacagctcaattagccaagataaaatgggtgataagtgtcgctttctacgtattgcaggctgccctgatgatctcactcatttggaagtattattctgtccctgtggctgtcgtgccgagtaaatggataacccctctagaccgcctggtagcctttcctactagagtagcaggtggtgttggaattacctgttggattttagtctgtaacaaagttgtcgctattgtgcttcatccgttcagctgaacaggaggatggatacagccgcgaggctaaaaaacggatttcctcttcctagcttaaaatctgatttacactgttttgttttttaagaaacaaaagtgcatagtttagattttttttttgttgaatatgtttgttcttggactttatgagatagtcttataagaatcacgattttctacacctgtcattgagccaagaaagtccagtttatgacacgtatgtactagtgaacaccgtcctcgatctgtacgaaatgtgaaatgtttagggacatctccatgctgtcacttgtgatttgccctcttatgtattttggtcatattgccaactggaaagtcaaaattttctaacaactttaagtaagttctttgaagacttagtgctgtttttaatccagtttagaaagtaacttaattttaataccgctactaaaaattcgaaaatttcttctttaatcacattcaatatggttaaaagaacaacactaattgacattgcgtgggctttttctccctttgtttaaaatgtcatttgttgagcaagagttgtatagtattatctacttacttgaggctgttaatttttcattacagtgttttgtaaatgtatccacgagaccatgatgcattgttttgtgctcaacttgtgttttgtatttaaagcattttgaatgaagtgtattttataagcatttaatatttatgctctttagaatggaacacagaaaacaaaccttataagtcctgattaaattaatctgaaccaaaaaaaaaaaaaaaaaaaaaaaaaaaaaa

SEQ ID NO: 20 - DNA, 1549 bp, Homo sapiens
gaattcgggggggagatgcgggtcatggcgccccgaaccctcatcctgctgctctcgggagccctggccctgaccgagacctgggccggctcccactccatgaggtatttctccacatccgtgtcctggcccggccgcggggagccccgcttcatcgcagtgggctacgtggacgacacgcagttcgtgcggttcgacagcgacgccgcgagtccaagaggggagccgcgggagccgtgggtggagcaggaggggccggagtattgggaccgggagacacagaagtacaagcgccaggcacaggctgaccgagtgaacctgcggaaactgcgcggctactacaaccagagcgaggacgggtctcacaccctccagaggatgtttggctgcgacctggggccggacgggcgcctcctccgcgggtataaccagttcgcctacgacggcaaggattacatcgccctgaacgaggatctgcgctcctggaccgccgcggacacggcggctcagatcacccagcgcaagtgggaggcggcccgtgaggcggagcagcggagagcctacctggagggcacgtgcgtggagtggctccgcagatacctggagaacgggaaggagacgctgcagcgcgcggaacacccaaagacacacgtgacccaccatcccgtctctgaccatgaggccaccctgaggtgctgggccctgggcttctaccctgcggagatcacactgacctggcagtgggatggggaggaccaaactcaggacaccgagcttgtggagaccaggccagcaggagatggaaccttccagaagtgggcagctgtggtggtgccttctggagaagagcagagatacacgtgccatgttcagcacgaggggctgccggagcccctcaccctgagatggaagccgtcttcccagcccaccatccccatcgtgggcatcgttgctggcctggctgtcctggctgtcctagctgtcctaggagctatggtggctgttgtgatgtgtaggaggaagagctcaggtggaaaaggagggagctgctctcaggctgcgtccagcaacagtgcccagggctctgatgagtctctcatcgcttgtaaagcctgagacagctgcctgtgtgggactgagatgcaggatttcttcacacctctcctttgtgacttcaagagcctctggcatctctttctgcaaaggcatctgaatgtgtctgcgttcctgttagcataatgtgaggaggtggagagacagcccacccccgtgtccaccgtgacccctgtccccacactgacctgtgttccctccccgatcatctttcctgttccagagaagtgggctggatgtctccatctctgtctcaacttcatggtgcgctgagctgcaacttcttacttccctaatgaagttaagaacctgaatataaatttgttttctcaaatatttgctatgaagggttgatggattaattaaataagtcaattcctggaagttgagagagcaaataaagacctgagaaccttccaaaaacccgcccgaattc

SEQ ID NO: 21 - DNA, 4480 bp, Homo sapiens
ttgttgcagaaggagacggcgtcgacgtctgactggactcgcggcgacttacctttcagtcgtgcgctcctgatccggcgctcggaatttgtccccggcttcagggctgcggggcctggaaggaggcgtatcgaggcggctcgaaaacgatccaggggagccgaggcgctcctcttgtcatcccactcagcgccatgtcctggatgttcaagagggatccagtttggaagtacttgcagactgtccagtatggagttcatggaaattttccacgcctctcatatccaactttctttccacgttttgaattccaagatgttatccctccagatgactttctaactagtgatgaagaagtagattccgttttatttggaagtttgagaggtcatgtggttggactacgctattacacgggagtagttaataataatgaaatggttgcattacaacgagatcctaataacccttatgataagaatgcaattaaagtaaacaatgtgaatggaaatcaagttggccatttaaagaaagagcttgcaggtgctttggcctatatcatggacaacaaattggcacaaattgaaggggtagttccttttggtgcaaacaatgcttttaccatgcctctgcatatgactttttggggaaaagaagaaaatagaaaagcggtttcagatcagttgaagaaacatggatttaaattgggtcctgcaccaaaaactttaggattcaatttggaaagtggttggggctctggaagagctggaccaagctatagtatgccagtgcatgctgcagtacagatgacaactgaacagcttaaaacagaatttgacaaattgtttgaagatttaaaagaagatgataaaacccatgaaatggaaccagctgaggctattgaaacaccactgcttccacatcaaaaacaagctctagcttggatggtgtcacgggaaaatagcaaagaacttccaccattctgggaacagcgaaatgacttatactataacacaataacaaatttttctgagaaggaccgaccagaaaatgtccatggaggaattttagctgatgatatgggtttgggtaaaactcttacggccattgcagtaatccttaccaacttccatgatggcagacctcttcctattgaaagagttaaaaagaatctactgaagaaggaatataatgttaacgatgactctatgaaacttggaggaaacaataccagtgaaaaggcagatggactaagcaaagacgcatctagatgtagtgaacaacccagtatttcagatatcaaggagaagagtaagtttcgcatgtcagaattgtctagctcccgccccaaaagaagaaaaactgctgtccagtacatagaaagcagtgattcagaggaaattgaaacaagtgaattgccgcagaaaatgaaaggcaaactgaaaaatgtacagtctgaaactaaaggcagggcgaaagcaggatcttctaaggttatagaagatgtggcatttgcatgtgcattaacttcatctgttcctacaacaaaaaagaaaatgttgaaaaagggagcttgtgcagtggaggggtcaaagaaaactgatgttgaggagagaccaagaacaacactgatcatctgtccgctttctgtgttaagcaactggattgaccagtttggacaacatataaaatcagatgtacacttgaatttttatgtttattatggtcctgatcgtattagagaaccggccttactttcaaaacaggatattgttttgactacgtataatattttaactcatgactatggaactaaaggagatagtccattacatagcataaggtggctaagagtgatcctggatgaaggacatgccatacgaaatccaaatgctcagcagacaaaagctgtacttgacttagaatcagaaagaagatgggttttgacaggtactccaatccagaattctttaaaggacttgtggtctcttctttcctttttaaaacttaaaccatttattgatagagaatggtggcatagaacaatacagcgtcctgtcacaatgggagatgaaggaggacttaggcgtttacagtccctaattaaaaatattacacttagaagaacaaagacaagcaaaattaaaggaaaacctgttttggagttaccagaacgtaaagtatttattcagcacattacactttcagatgaagagagaaagatttatcagtctgtgaaaaatgaaggcagagccactattggaaggtattttaatgaagggactgtcctggcacattatgcagatgtcctgggtcttttgcttagactgcggcaaatttgttgccatacttaccttcttacaaatgcagtgtcttccaatggcccctcaggaaatgatacacctgaagaactgagaaagaagttaataaggaagatgaagttaattctgagctcaggttcagatgaggaatgtgcaatttgcctggattctttaacagttcctgtgataacacattgtgcacatgtattttgtaaaccctgtatttgccaagtcattcagaatgagcagccacatgctaaatgccctttatgcagaaatgatatacatgaagataatttattagaatgtcctccagaagaattagcacgtgacagtgagaaaaagtctgatatggaatggacatccagttcaaagattaatgcgctaatgcacgcattgactgacttaagaaagaagaatcccaacataaaaagtttggttgtttctcagtttacaacattcctgtctttaatagaaataccacttaaagcctctggatttgtgtttactcgtttggatggttccatggcccaaaagaaaagagttgaatcaattcagtgttttcaaaacactgaagcaggatctccaactataatgcttctgtccttaaaagcaggtggagttggtttgaatctgtctgcagcttctcgagtgtttttaatggatccagcctggaatcctgctgctgaagatcagtgctttgacagatgccatagacttggtcagaagcaagaagttatcatcacaaaattcattgtaaaggactctgttgaagaaaatatgctgaaaatacaaaacaaaaagagagaacttgcagcaggagcctttggaactaaaaaaccaaatgctgacgaaatgaaacaagccaaaattaatgaaatcagaacattaattgacttataatttgtgggattttagtaagaagactactatatgtgagaggcgtgatatctggatggaagttgggctggatgatctccaaagtcgtttcaactcttaaagacatcttaatcctgaatgtaaacaattgttatgtgtttagaatcagaatttgattttgaacttgagtaattcatccttacagctatctgtagaattagtcatcttttttcttttcttttttttttacttttttgttaataagcaaacttatttgctgcagaatttgggttgactcctgagcatatttaaaacaaagaagctagaaatttagcagtcagattaggtaggtggttttatttcaaagggaaactttaatccaaagaaagattaattactctaacaaacaagagaagcttcatgtttgatgatacagatttaagaatacctgagacttaagagtgttggaagtcatttgatagaaagatgagatcggagacaatgttgtgttatagggcacacattgaaggtatatgccaaatctctcaccagataagtccttttctccctgtgccgttttcttgctcaaagggaacagtgaattagccagctagaatcttcctggtccctttttgaggcagtagcaggtaaggaaagggctgattttcatcaaaaccaagacctttctgcagggatgatagtggaataataatgtgggattagcccgctagcattaggagcagttgggaagttacctggtagatcaagcattacacacaaaaaatcaagttgatcagagtatgggttctccatatagcaatacttcagtgagattaagtataaacagtttttggcaaaaaacaacacagtctactctttctgcttacaaagacaaagccttacaaactcactatgaaggtaaagggaggacagcttgcttctttgcccagacatttacaaagttgtttttaaaacacactcataagtaagtttggcaagttgtttaaaaaatgtctctttgttttgtacagttctgttagatgttgttatattttaaaagtttaatttaaaaaatttaatttgtccttcctaagaaggataaatatataaaaaagccactggaatgaaaacttcctatatgctatgctgttgtcttattattatatagaaaaataactttagaaaaatattgaagacattgtattaccacttgtgattcaaacaattttgtggttaaaactggattttaaatttaaaaatcaataaaaatttcaaatgtt

SEQ ID NO: 22 - DNA, 2552 bp, Homo sapiens
ggcacgagggaagagctcccaccttctctggatgtgcctgggcttggactggctagaatctttctctggactgttgcatgtacagtgcctccatcctggaggcaagagagttgggagtggctcgaatcagagccgtgcccaagatatccctgctgttgcatcgtttgaagctgacgtcctgtgtctgtacactgctgccactgttgtgtcctcgctctgcttgctgttgcctcacgccaggccccgtcctgccgtgacacccttcatcctacccttggaaccccaaggccaagttggttcaaactgttggagaacagagttggcctgcatctggaacacacttgtcctcagcttaccatctcctcacaccccagagtggaaaggtgaacacctgcagctgaggcttggaaacgtttcttgtgttgccctgaaaaatctttgagacctcagggaggctctgtctctcttaaaaggtggagaaagatgccattctctccctaaggtctggtggagtctccccatcttgcatacccttctgcaagccatctatctctgctcactctccaattgacccgcctgggaacaagggatgaggaggagttgggggctggggggaatcctgccagttggtgaagccctgtggcaggaaggtatatgtggacatagagtatacctgattctctttcttcagccactgactgcttgggttgggctgtgaatgataatggaatggctggagtctgctgttgtcagaaggcagggagggtgatgaaggactgacccacatggactgggatgtgtgtcggttatgggcatgactgcacgttcactctcagtgggatctgggcaacatggagttcattgtcctgttgcttacttactgcaatgtctttggccctccttttcaactggttcctctgttgggcccaaaggttgggagtaggagacagtatcccaggctgacaagggcttgccctttaccttgggcaccttgttaatttttagcctgtgcccttccccacctttgccctcccagtggttggtatgtgggaagcccatctcagttcctgtgacttcatgtctcaaaccaaggatgagcgtctggtctctgctatgatggtggtatccgaggcctttccctgcccagtctggtgcctgccccacattgtaccggacactggattcctggacccccttctcctttcctttctttccttcaggtcacgcagccctgtactgtatccagcaccacagaaacctcagtgtttttcctctgctggtttggggcacaaggaagccttagggtatggggaaaggctgttattacctagagtttactcccaggccagggggctgccatcttcttcacagacatccctgaaaggaagcccctttggggcagggaggtgaggacttcatctcaacatcggctggtggttggtaggggagctttttcttttctttcctttttttttgtttttgtttttgtttttgtttttggtaacatgttaggagttaatgttgcaaagagtagtttacatcttcactttctgaagacacttgaatttaggaccgatgtatctgtgacaagcatgccagaagtggcaggggccatcagggctaaccacttcacacctaccatcgtcccatggggatccaagacctgagataaagcaacagcctgcccagatccctctgttcatcctatcccttccaaggttggtccatgccaacataacctctgggcatcagacatcagcaggtctgtgtgcctcagccctgttaaggggcaggtttctctttagccctcttcctgcacttgggagcaaaggcactaccagtagagaagggccatccagccgtgccccagcctggacccctggggctcagatagaggtgctgagcccctgtgtcaaagttgttaaatgtttttgttttgttccattgtagctctttttttttttttccctttcctggtgattgattttacaaaagaaagtaagctgcttagaaggccctggaagggaagtgaggaggagggacaaggaagatgactagttacggagggtgagggttgttttttgccaaaaagcctgggtagagtgatctgaattatctggcaccctcctgaatggaaccccagagtacctcctgtgtggaagggtccctggattttccctaacacccaccctctcccccttcagccatgctgatggcagagaagataagaacttggagcccatttctcactggagaggaaaacttgtcatctggctttgcggagaaggttccaccttacgctcgtagtacattatctttactatgtgctaggatatcatatttaaaaggacaaaaaaatgtaaaatacttgaatgagcttgtattataacattaatattattgagagtatctgctttccaggctgaagtgattcattcattattctagtcctgctttagtcctttgtaatttgtggtaattatgcttttctttttaatacaaaaaaatgtataaaaataaacacttgaaaaggcaaaaaaaaaaaaaaaaaa

SEQ ID NO: 23 - DNA, 2562 bp, Homo sapiens
gccgcgccggctctgggcactcagcatcgtttccttttcctccgctggagcagctatggcggcggtgaagaccctgaaccccaaggccgaggtggcccgagcgcaggcggcgctggcggtcaacatcagcgcagcgcggggtctgcaggacgtgctaaggaccaacctggggcccaagggcaccatgaagatgctcgtttctggcgctggagacatcaaacttactaaagacggcaatgtgctgcttcacgaaatgcaaattcaacacccaacagcttccttaatagcaaaggtagcaacagcccaggatgatataactggtgatggtacgacttctaatgtcctaatcattggagagctgctgaaacaggcggatctctacatttctgaaggccttcatcctagaataatcactgaaggatttgaagctgcaaaggaaaaggcccttcagtttttggaagaagtcaaagtaagcagagagatggacagggaaacacttatagatgtggccagaacatctcttcgtactaaagttcatgctgaacttgcagatgtcttaacagaggctgtagtggactccattttggccattaaaaagcaagatgaacctattgatctcttcatgattgagatcatggagatgaaacataaatctgaaactgatacaagcttaatcagagggcttgttttggaccacggagcacggcatcctgatatgaagaaaagggtggaggatgcatacatcctcacttgtaacgtgtcattagagtatgagaaaacagaagtgaattctggctttttttacaagagtgcagaagagagagaaaaactcgtgaaagctgaaagaaaattcattgaagatagggttaaaaaaataatagaactgaaaaggaaagtctgtggcgattcagataaaggatttgttgttattaatcaaaagggaattgaccccttttccttagatgctctttcaaaagaaggcatagtcgctctgcgcagagctaaaaggagaaatatggagaggctgactcttgcttgtggtggggtagccctgaattcttttgacgacctaagtcctgactgcttgggacatgcaggacttgtatatgagtatacattgggagaagagaagtttacctttattgagaaatgtaacaaccctcgttctgtcacattattgatcaaaggaccaaataagcacacactcactcagatcaaagatgcagtgagggacggcttgagggctgtcaaaaatgctattgatgatggctgtgtggttccaggtgctggtgccgtggaagtggcaatggcagaagccctgattaaacataagcccagtgtaaagggcagggcacagcttggagtccaagcatttgctgatgcattgctcattattcccaaggttcttgctcagaactctggttttgaccttcaggaaacattagttaaaattcaagcagaacattcagaatcaggtcagcttgtgggtgtggacctgaacacaggtgagccaatggtggcagcagaagtaggcgtatgggataactattgtgtaaagaaacagcttcttcactcctgcactgtgattgccaccaacattctcttggttgatgagatcatgcgagctggaatgtcttctctgaaaggttgaattgaagcttcctctgtatctgaatcttgaagactgcaaagtgatcctgaggattacagctgtggaatttttgtccaagcttcaaataattttgaaagaaattttcccatatgaaaaaaggagagaacactggcatctgttgaaatttggaagttctgaaattatagtatttttaaaaattgcactgaagtgtatacacataaagcaggtcttttatccagtgaacaggatgttttgctttagcagcagtgacataaaattccatgttagataagcatatgttacttaccttgttattaaatatttcttgaaaagcaaattttaatggttaattttatgtggacgtatgttaaattatccaaactaccctattgttaagcatttggttttaaaatttttatgctaatataaatgctcaagtaatttaaaatattgaaagcatccctgttggtataaatttctgagtaaatgcattggatcagttggactttgaacgccctttgaaatggctttgctaaaatgctcccgccacaaagttgtaggaaatgggaagaggagtcaactagaggcaagggagttgagagagctgcaactgtaaagggcaagaacaggcagaggtaaaaagatgatggaaggtgtggtgactaagggccacggttattgggtgaaatttgagatgtaggccaactgtattttcaagcttctgaacttaaggcaaaatattcatcgcaaagtctctagcgtcatatttttctcacccaaattacgtttccacgagttattatatatagttggtctatctctgcagtccttgaaggtgaagttgtgtgttactaggctgtgttttgggatgtcagcagtggcctgaagtgagttgtgcaataaatgttaagttgaaacctcaaaaaaaa

SEQ ID NO: 24 - DNA, 5308 bp, Homo sapiens
atggagcctcggcaccgctgttccggaccgaggctaacggacggcggcgcctctgctcctactagttttctcccggaccaaccgaaaagccgaggcggagcgcgggggtgtgaagatctcggcctgctgggggtccctggagctgagggaaaaatagaaatgaaggtacatatgcacacaaaattttgcctcatttgtttgctgacatttatttttcatcattgcaaccattgccatgaagaacatgaccatggccctgaagcgcttcacagacagcatcgtggaatgacagaattggagccaagcaaattttcaaagcaagctgctgaaaatgaaaaaaaatactatattgaaaaactttttgagcgttatggtgaaaatggaagattatccttttttggtttggagaaacttttaacaaacttgggccttggagagagaaaagtagttgagattaatcatgaggatcttggccacgatcatgtttctcatttagatattttggcagttcaagagggaaagcattttcactcacataaccaccagcattcccataatcatttaaattcagaaaatcaaactgtgaccagtgtatccacaaaaagaaaccataaatgtgatccagagaaagagacagttgaagtgtctgtaaaatctgatgataaacatatgcatgaccataatcaccgcctacgtcatcaccatcgtttgcatcatcatcttgatcataacaacactcaccattttcataatgattccattactcccagtgagcgtggggagcctagcaatgaaccttcaacagagaccaataaaacccaggaacaatctgatgttaaactaccgaaaggaaagaggaagaaaaaagggaggaaaagtaatgaaaattctgaggttattacaccaggttttccccctaaccatgatcagggtgaacagtatgagcataatcgggtccacaaacctgatcgtgtacataacccaggtcattctcatgtacatcttccagaacgtaatggtcatgatcctggtcgtggacaccaagatcttgatcctgataatgaaggtgaacttcgacatactagaaagagagaagcaccacatgttaaaaataatgcaataatttctttgagaaaagatctaaatgaagatgaccatcatcatgaatgtttgaacgtcactcagttattaaaatactatggtcatggtgccaactctcccatctcaactgatttatttacatacctttgccctgcattgttatatcaaatcgacagcagactttgtattgagcattttgacaaacttttagttgaagatataaataaggataaaaacctggttcctgaagatgaggcaaatataggggcatcagcctggatttgtggtatcatttctatcactgtcattagcctgctttccttgctaggcgtgatcttggttcctatcattaaccaaggatgcttcaaattccttcttacattccttgttgcattagctgtaggaacaatgagtggagacgcccttcttcatctactgccccattctcagggtggacatgatcacagtcaccaacatgcacatgggcatggacattctcatggacatgaatctaacaagtttttggaagaatatgatgctgtattgaaaggacttgttgctctaggaggcatttacttgctatttatcattgaacactgcattagaatgtttaagcactacaaacaacaaagaggaaaacagaaatggtttatgaaacagaacacagaagaatcaactattggaagaaagctttcagatcacaagttaaacaatacaccagattctgactggcttcaactcaagcctcttgccggaactgatgactcggttgtttctgaagatcgacttaatgaaactgaactgacagatttagaaggccaacaagaatcccctcctaaaaattacctttgtatagaagaggagaaaatcatagaccattctcacagtgatggattacataccattcatgagcatgatctccatgctgctgcacataaccaccacggcgagaacaaaactgtgctgaggaagcataatcaccagtggcaccacaagcattctcatcattcccatggcccctgtcattctggatccgatctgaaagaaacaggaatagctaatatagcctggatggtgatcatgggggatggcatccacaacttcagtgatgggctcgcaattggtgcagctttcagtgctggattgacaggaggaatcagtacttctatagccgtcttctgtcatgaactgccacatgaattaggagattttgcagttcttcttaaagcaggcatgactgtaaagcaagcaattgtatacaacctcctctctgccatgatggcttacataggcatgctcataggcacagctgttggtcagtatgccaataacatcacactttggatctttgcagtcactgcaggcatgttcctctatgtagccttggtggatatgcttccagaaatgttgcatggtgatggtgacaatgaagaacatggcttttgtcctgtggggcaattcatccttcagaatttaggattgctctttggatttgccattatgctggtgattgccctctatgaagataaaattgtgtttgacatccagttttgacctttcccagtaatcactgttgattacgagaatgttaccatgcagctttgcatctgttccttgtactgtatgcacattgctcaaaggaaagtcagtggcttgcactacttacaagtttcatagatttgagcctaaccacaagaggctggtgcttagtactgttttccctgcacgtaggggtcttttaaaaatataaagcttgtgataaagagaggagaatatgggactccatgaaccagtgttgatatgtttgattaagacttttcacaaaataatcatataaaacactagtctctttattagtagaaacttctgtggctatgcagaaatagagatcgaaccaaaaaaaatcatttaaactttaaaaatattttaaatggactttggggagacattttttgtgtgttttaagaatgaattgtagtgctctttaattcagctacatatattcatgtggtgatagggatcaacttgacacaactttgaaactgcataaagtagacataggaactagaggaaagctcaggctgcattagagtatgaatttagcattgggaaaagcccttattcttgaatctagagttactatttttgtatatatttgcatagtgtttaaacctgcagcctaaactactgaaatttgtgattgtatgtttgtgtgagcttcagtttaatgaaagattcataatggttctttgtattattataatacttggtgttggggtgttctttctgttttgttttttactttaattttgttttgattttttttttttttttttggcgggggtaggtgagggtttggagcatgtggtctttttaaaaaattgtaaccctctagaaaatatcaaagaaatgaaccagacgtggtttaaatagttgattttcctattttaacagtaccaactagttaattgggaaatgtaagttctgaatgttcacattgctttaccagtttggcactggaaccaagagcacatgtcgtggctggctacaaggttgtaaagcagaaaatcgaagtttaccatgtctgtaatgtgtacatgaagtgtcaatttagaacagttactaggataaactccattattgccatggctgtcatggtacccaagtgacttggaagatgcatttaaattactcagctgaaatcacttgatcatcttgtgccaagatatgctgttggtgcctgatagggattagtcttttaggtgccctgttctcctaccataattgtgaatgatttgtgagaagtgcaagccatgtttatcctgaatttttacttaataatttgtattactagtcatatgcatgtagctttctgtttacatcctatgccacatggtcttcatttatgccaggtaaactgtatttgaactatgtgcagctagctttgttttaatctgcttggcaaccagtgtagctgctgtaacaatctatcttattgttcaaatatataagagccaaactcttttccattccatctaaaatgttttcatttagtactcttctttcctcctactctatgaacttcaaaacaaaaacaaaactttgagagcagcacatgcatccaggtatttatagattattgccagtgtcttttctgtatgctataagcaagggagcttaggtgttatttctttaatttatgcttgaatctgaaaaattatttctgacttactccatggcctccttataataagtagaagttttatatataattaattttcagcattgggcactgaattaggacagtcctcatctcattgcttggcccttcaagcaacctagctaaaaggtgctgatattttatttagtactgccaacttcaagtgatttagatatctatctatctagatttctgaaccaagatatatttatagttcacttttgggtttttatacccacggtaggattctgcattccagcattaaatctgcttcattttagaacctttataaaagcaatagctggaatatactcccagttttaaaataaatgcctgattgatttaaagcaagtaggttatgctgaagtatataaagaagttttatattctctcaaaaatggtattatctttctttatttgctagattcttacaaatcttttaagagggctgtaacagttgctgctagtattagggttccacatcattctaatgtatagtttcaagtcttaatagacaatctgaattccactacatttcttttggctccaacattccttttagcttgaccagtctaatttaaaatgtgtttgttggaggtcattaacgttacttgtacaatgctgtcactgtgtgacatccatatgaattttggtatatatcaatcaatcaatcaatcacattgcattcaatcaatcagctgtgattgattgattatgcttagaaatactatagtaactagatgcagtgtgaattttttccattaacaaacaaacaagtcagtggcttaaatgtgattatggtcctgcaaggtgattcttgctaaaatatctaaacttttgttttgttttaactgaatcattttttaacttaaaaagctggaaaatatcaaatgctgttttttttttttcattgtcaacagtggtgtgtcattttatgtatgttcctaatgcttatggaactcctccaaaataaagttactcaaagag

SEQ ID NO: 25 - DNA, 1942 bp, Homo sapiens
gcagtgcggcggtcacaggctgagtgctgcggcgcgatccttgcttccctgagcgttggcccgggaggaaagaagatggtgctggatctggatttgtttcgggtggataaaggaggggacccagccctcatccgagagacgcaggagaagcgcttcaaggacccgggactagtggaccagctggtgaaggcagacagcgagtggcgacgatgtagatttcgggcagacaacttgaacaagctgaagaacctatgcagcaagacaatcggagagaaaatgaagaaaaaagagccagtgggagatgatgagtctgtcccagagaatgtgctgagtttcgatgaccttactgcagacgctttagctaacctgaaagtctcacaaatcaaaaaagtccgactcctcattgatgaagccatcctgaagtgtgacgcggagcggataaagttggaagcagagcggtttgagaacctccgagagattgggaaccttctgcacccttctgtacccatcagtaacgatgaggatgtggacaacaaagtagagaggatttggggtgattgtacagtcaggaagaagtactctcatgtggacctggtggtgatggtagatggctttgaaggcgaaaagggggccgtggtggctgggagtcgagggtacttcttgaagggggtcctggtgttcctggaacaggctctcatccagtatgcccttcgcaccttgggaagtcggggctacattcccatttataccccctttttcatgaggaaggaggtcatgcaggaggtggcacagctcagccagtttgatgaagaactttataaggtgattggcaaaggcagtgaaaagtctgatgacaactcctatgatgagaagtacctgattgccacctcagagcagcccattgctgccctgcaccgggatgagtggctccggccggaggacctgcccatcaagtatgctggcctgtctacctgcttccgtcaggaggtgggctcccatggccgtgacacccgtggcatcttccgagtccatcagtttgagaagattgaacagtttgtgtactcatcaccccatgacaacaagtcatgggagatgtttgaagagatgattaccaccgcagaggagttctaccagtccctggggattccttaccacattgtgaatattgtctcaggttctttgaatcatgctgccagtaagaagcttgacctggaggcctggtttccgggctcaggagccttccgtgagttggtctcctgttctaattgcacggattaccaggctcgccggcttcgaatccgatatgggcaaaccaagaagatgatggacaaggtggagtttgtccatatgctcaatgctaccatgtgcgccactacccgtaccatctgcgccatcctggagaactaccagacagagaagggcatcactgtgcctgagaaattgaaggagttcatgccgccaggactgcaagaactgatcccctttgtgaagcctgcgcccattgagcaggagccatcaaagaagcagaagaagcaacatgagggcagcaaaaagaaagcagcagcaagagacgtcaccctagaaaacaggctgcagaacatggaggtcaccgatgcttgaacattcctgcctccctatttgccaggctttcatttctgtctgctgagatctcagagcctgcccaacagcagggaagccaagcacccattcatccccctgcccccatctgactgcgtagctgagaggggaacagtgccatgtaccacacagatgttcctgtctcctcgcatgggcatagggacccatcattgatgactgatgaaaccatgtaataaagcatctctggggagggcttaggactcttcctcagtcttcttccccgggcttgaaccccgaaaaaaaaaaaaaaaaaaaaaaaaaaaaaaaaaaaaaaaaaaaaaaa

SEQ ID NO: 26 - DNA, 773 bp, Homo sapiens
aagccacctcaagtggacaaggcacttaccaacagagattgctgatttgctccttaagcaagagattcactgccgctaagcatggctcagaccaactcgttcttcatgctgatctcctccctgatgttcctgtctctgagccaaggccaggagtcccagacagagctgcctaatccccgaatcagctgcccagaaggcaccaatgcctatcgctcctactgctactactttaatgaagaccctgagacctgggttgatgcagatctctattgccagaacatgaattcaggcaacctggtgtctgtgctcacccaggcggagggtgccttcgtggcctcactgattaaggagagtagcactgatgacagcaatgtctggattggcctccatgacccaaaaaagaaccgccgctggcactggagtagtgggtccctggtctcctacaagtcctgggacactggatccccgagcagtgctaatgctggctactgtgcaagcctgacttcatgctcaggattcaagaaatggaaggatgaatcttgtgagaagaagttctcctttgtttgcaagttcaaaaactagaggaagctgaaaaatggatgtctagaactggtcctgcaattactatgaagtcaaaaattaaactagactatgtctccaactcagttcagaccatctcctccctaatgagtttgcatcgctgatcttcagtaccttcacctgtctcagtctctagagccctgaaaaataaaaacaaacttatttttatccag

SEQ ID NO: 27 - DNA, 5813 bp, Homo sapiens
ccgccccgcgcctaggctgttgctggccgcggccgccgccctcccccggcccaatggcgtggcggcacagtcagtgatgtgacgctcaggcttgtccggcccccggctcgcagcccattacaccatccgtcgcagcagtcgctgcagccgctgcagtccgagccgactaagggcgggaggcagctcgggtggcggggcgtggcgaacagcgcggccggattcattcctttggggcgcggagcatggaggagctgtgcggccgcaggcggagcagggcggcccgggcggcggtggggacaacggtttccctttgaaggggacggacaaagcccgagtgaccagcggcggcggggaggactagtccccgggcagtttggtgccctggttgtcagatgttggaaagcagtaggacggaacatactcttcgtggttgtgtatccgttctggggtgcagcaattaacattggactttggttcctgtgactcttgcctgtgtcgatagagttaaactggagctctgctttgaaagataaataaagcacagcctctcaactggacataaatggatctaaagacagcagtatttaacgcagctcgggatggcaaactccggcttctcaccaaattgttggcaagcaaatccaaagaggaggtttcctccttgatctctgaaaaaacaaatggggccacgccactcttgatggccgccaggtatgggcaccttgacatggtggaattcctcctagagcaatgcagtgcctccatagaagttgggggctccgtcaattttgatggcgaaaccattgagggggctccccctttatgggccgcttctgcagcaggacatctgaaggtggtccagtccttgttaaatcatggagcatctgtcaacaacacgactttaaccaattcaactcctcttcgagctgcgtgtttcgatggccatttggaaatagtgaagtaccttgtagaacacaaagctgatttggaagtgtcaaaccgacatgggcatacgtgcttgatgatttcatgttacaaaggacataaagagattgctcagtatttacttgaaaagggggcagatgttaatagaaaaagtgtcaaaggtaatactgcattgcatgattgtgcagaatctggaagtttggacatcatgaagatgcttcttatgtattgtgccaagatggaaaaggatggttatggaatgactccccttctctcagcaagtgtgactggtcacacaaatattgtggattttctgacacaccatgcacagaccagcaagacagaacgtattaatgctctagagcttctgggagctacatttgtagacaaaaaaagagatctgcttggggctttgaaatactggaaaaaggcaatgaacatgaggtacagtgataggactaatattattagtaaaccagtgccacagacactaataatggcttatgattatgccaaggaagtgaacagtgcagaagagctagaaggtcttattgctgatcctgatgagatgagaatgcaggcactattaatcagagaacgtattcttggtccttctcatcctgatacctcttactatattagatatagaggcgctgtctatgcagactctggaaatttcaaacgatgcatcaacctatggaagtatgctttggatatgcagcagagcaatttggatcctttaagcccaatgaccgccagcagcttattatcttttgcagaactattctcctttatgctacaggatagggctaaaggcctgctgggtactactgttacatttgatgatcttatgggcatactttgcaaaagcgtccttgaaatagagcgagctatcaaacaaactcagtgtccagctgacccattacagttaaataaggccctttctattattttgcacttaatttgcttgttagagaaagttccttgtactctagaacaagaccatttcaaaaagcagactatatacaggtttcttaagctgcatccaaggggaaagaataacttcagccctcttcatctggctgtggacaagaatactacatgtgtagggcggtaccctgtttgtaaatttccatctctacaagttactgcaatactgatagaatgtggtgctgatgtgaacgtcagagactcggatgacaacagtcccctgcatatcgctgctcttaacaaccatccagacatcatgaatctccttattaaatcaggtgcacattttgatgccacaaacttgcacaaacaaactgctagtgacttgctggatgagaaggaaatagctaaaaatttaatccagcctataaatcataccacattgcagtgtcttgctgctcgtgtcatagtgaatcatagaatatattataaagggcatatcccagaaaagctagagacttttgtttcccttcatagatgataacttgactgtattttagcactgttaaagcacgaattggtaacagttgtttcataaatgagcactgttgtgataacaccagcattcatttagcttgattgatatcattgtgctctcattggctaaagcattataagcatcaaatttacaacattggtttcccaatatttaatataaatataccatataatatattgtttgtgaattattgagaaatgtaacattcaaatttctaaaattgtctgccaaaggcttattcattctggttttgtttgctgttgggtgtttggggcagagttaaccatttctccatggtgtctttatactttactggtttgtgaattttatacaattgaaagtctttttttcttgcttctttcttctcttctcaagtttcccccctgtttctactttattgtttgtcctaaccatttctactacagttttttccttatggacccatactaggttgtacaaaccttaaggactcgttaccatttgcagttaccataagtgctttatcttctctatgcacaggcttaaacttgactgttgtatgttagcatattttctatgcagcagttggtcaacttcaactcaaaacactgttttcttatgtttgttacaaacttaattttttgaaagtactctgtagcatgacaatttttagagctgcaggttagctattatagctcaagcttttttgtttgtttttttcttcactttcttcacatctgaggtttctttctctaatccactgaaattattgtgtgctaaatttgggaaacagatctattctaactcattaacccagttgaaatttaggtctgtcatcttaatatatcatgcagtaaaaggaagaatctttttaaagtgacccacctttcatgctgctccagcattgtcctgcttgtgctgatggtgtgattaggtgtagagaatttgcttaaatttaacttcaaagttcatcacacagcttaatgagtcacattgaaatactcagtaattgaactgcaaatcacttttagttacaaaaagagctaaagcatgtcagtggcatgatgcttgccaagccagatctaggcatctaggataattaaggtattttagtatgcaatttactgccataatatcaaaggtcagtaacagtgttctttctttcttcaagcttatgtatacctttaaagataacttgcatgaattactttgattactttggtctcaattatttgtcaccccagttaaacatgaaaggttgcagtgcttcctgttcccttactggaagttagctttttcttttctctttcttcctttctttctctcactctttctttctctttctctttctctctctctctctctctcactcactcactcacagatttgctaatgccacagaaagggctcttttaacttaagataagtgaaaagtactaaaaaagattcaggtaattatcattcagcactttattgtaattcagaataaaatttatgatggcatatttgccctgcaaatgtcttaatgaagttgttctcaataaaaagctccttattgatttgagaaaaactcagtttacctgtgagttcaatgagctggatcactcacttggatttttgtgttgacattttattctgagggttgatgttacactatttaaggagtcatcaatgcaaacagtcacattaggtatgtcatcatctttagtcagtaaaaaccttgtaatgaggagtagtaaataaacaagagaacattagactttttggttaaataattgagatttaatttttaaaagatattcttactcatttgctaggttgtaaatttgatttcaccattaagaaaaggtaaattggatataaatgaacgatctccaactttttgatgaagaggttttactatctctcactgtgggaaaatttgatgaaatatttgaactgtcacatatattaagaatactttatgatttagaccaatattctagaaatatcaaatgtcagtatcttgaaatcatctgcctctaactttgtggtataagaattatatatgaataagctattatttttataaaggaaaactttgccattatagtaaattacattagttgatctcgataatttgaggataacagatgacaattgaatttttaattgatttagtatttcctcctcctctttgggggctgggtgggagggcttacatgctcttatagtgaggcacatctcactgttttgcagcagaatttgaattgtgcaactcctgtgtaaagtaaggatttctttaaatagcatttttgcaccagtaaaaatagataacttagaactcagtcttgataactgaaatgacttatttcacttagaatacatttctcccttctctgccatctccacaaatgccattgggaggttttgaaaaaccagttaatttaatagctcaaaattgtccctgattttattttcttttagggaaaattgtttcataaatgtgacactgataaagcctttgtcagaaagtattctcacaattatgagatggattataataaaatacttaaatttgtgttattttttgaaccacagatgagtaaatttaataatgaaccaattacactcttgagtctaactaaactgtacactgtagcacggtgttattgactggagttaatgtgtaagttattaacatttctatgaaaatgcccttttggggcctcctgaattttagatgttccactgttttgatcatttctataaaagaaatggtcattttacttagatgccagtctactttataaagacaaatggattatagacttaaaaatagtcatttttcttattcataaatctgacaggcataaacccaaatcaaagataatttggtgcccattatgaatttgaagttaagtgatagctcacttgtaaagtgactaccttaatgtgtatagagaccccagtctactattatttgggaaaattgtttaggttatatgggaaaagtagctctttaaaaatcatattgcccaacagaaaccttaggctgaatttacaggtatgataatttttgtaattaattttcttagaattgtgcaggctggatgagataatgacatactcttttacactgtaacagcagcattattgcctagaactttaaccattttagagttagatactaaggaaacaaactaattggtcatcatcattttctttttttctttttcttttttttttttttgcccttatgtgtcactaaacaactagtttctctcccttttgtcagttcccattgtgtattttttcaaaagaagtactgtattcggatgccagctaataaattgtcacacaatggaaaatcatatgccacaacattcattgtaaggtttaataaaattaaatttgcacc

SEQ ID NO: 28 - DNA, 1464 bp, Homo sapiens
ccctcgcctggctccctgccccgccccgcccgccgtcccccgcttggcttccagcgccgcttgcgctccggagcgctggctctgctggcgctgagaaatggaccaattttgacaagatatagtgctgcagcgtgcctgatgggatatattcagtcatggcgtccgaactttgtaagacgatctctgtggcaaggctagaaaagcacaagaatttgttcttaaattataggaatctgcaccattttccattggagttactgaaagatgagggactgcagtacttggagagactctatatgaaaaggaactccctgacatccttgccagaaaaccttgctcagaagcttccaaaccttgtggaactatacctgcactcaaataacatagttgtggttccggaagccattgggtctcttgtaaaactccaatgtctggatcttagtgacaatgccttagaaattgtttgcccagaaattggtcgtctgagagctttacgtcatcttcgattagctaataaccaactgcaattcctacctccagaggttggcgatttgaaggagctgcagacactagacatttctaccaatcgtttgctaactttacccgagaggcttcacatgtgcctttctctgcagtacctcactgtggaccgaaatcgtctatggtatgtgccgcgccatctctgccagctgcccagcctcaatgagctctccatggctggaaaccgtcttgcatttttgccacttgatttaggtcgatctcgagaactacagtatgtatacgtggataacaacattcacctgaaaggcttgccatcttatctgtacaataaagtcatcgggtgcagtggctgtggtgctcccattcaagtttccgaggtgaagctgctttccttttcatcagggcagcgaaccgttttcctcccagctgaggtgaaggccatagggacggagcatgatcacgtcctccctctgcaggaattggctatgagagggctgtatcatacctaccacagcttgctgaaagatttgaactttctgtctccaatctcattacccagaagtctcctagagctgctgcactgccctctggggcactgtcatcggtgtagtgagcctatgtttaccatcgtctaccccaagctctttcccttgagagagacgccaatggcagggctgcaccagtggaagacaactgttagttttgtggcttactgctgctccacccagtgtctgcagacttttgacctgctgagttgataaacactcaagaacctcaggagcgctgccagcttgacactggggaatccagccagtccagcacactcttccatcctgtcctgtccaatgcgggggcactgcagaactctctagaaatgtcatgattgagcttcagagctaaaatgccttcacccttcccccaagttggaatatatcctcccccaaattaaaaaaaaaaaaaaaa

SEQ ID NO: 29 - DNA, 4248 bp, Homo sapiens
aaaggtaaccactcctttgtggaggtcgccagggtcattgtcgtggatttgcacagtcggctgggcggtgcaatggcggaaagaaaaggaacagccaaagtggactttttgaagaagattgagaaagaaatccaacagaaatgggatactgagagagtgtttgaggtcaatgcatctaatttagagaaacagaccagcaagggcaagtattttgtaaccttcccatatccatatatgaatggacgccttcatttgggacacacgttttctttatccaaatgtgagtttgctgtagggtaccagcgattgaaaggaaaatgttgtctgtttccctttggcctgcactgtactggaatgcctattaaggcatgtgctgataagttgaaaagagaaatagagctgtatggttgcccccctgattttccagatgaagaagaggaagaggaagaaaccagtgttaaaacagaagatataataattaaggataaagctaaaggaaaaaagagtaaagctgctgctaaagctggatcttctaaataccagtggggcattatgaaatcccttggcctgtctgatgaagagatagtaaaattttctgaagcagaacattggcttgattatttcccgccactggctattcaggatttaaaaagaatgggtttgaaggtagactggcgtcgttccttcatcaccactgatgttaatccttactatgattcatttgtcagatggcaatttttaacattaagagaaagaaacaaaattaaatttgggaagcggtatacaatttactctccgaaagatggacagccttgcatggatcatgatagacaaactggagagggtgttggacctcaggaatatactttactcaaattgaaggcgcttgagccatacccatctaaattaagtggcctgaaaggtaaaaatattttcttggtggctgctactctcagacctgagaccatgtttgggcagacaaattgttgggttcgtcctgatatgaagtacattggatttgagacggtgaatggtgatatattcatctgtacccaaaaagcagccaggaatatgtcataccagggctttaccaaagacaatggcgtggtgcctgttgttaaggaattaatgggggaggaaattcttggtgcatcactttctgcacctttaacatcatacaaggtgatctatgttctcccaatgctaactattaaggaggataaaggcactggtgtggttacaagtgttccttccgactcccctgatgatattgctgccctcagagacttgaagaaaaagcaagccttacgagcaaaatatggaattagagatgacatggtcttgccatttgagccggtgccagtcattgaaatcccaggttttggaaatctttctgctgtaaccatttgtgatgagttgaaaattcagagccagaatgaccgggaaaaacttgcagaagcaaaggagaagatatatctaaaaggattttatgagggtatcatgttggtggatggatttaaaggacagaaggttcaagatgtaaagaagactattcagaaaaagatgattgacgctggagatgcacttatttacatggaaccagagaaacaagtgatgtccaggtcgtcagatgaatgtgttgtggctctgtgtgaccagtggtacttggattatggagaagagaattggaagaaacagacatctcagtgcttgaagaacctggaaacattctgtgaggagaccaggaggaattttgaagccaccttaggttggctacaagaacatgcttgctcaagaacttatggtctaggcactcacctgccttgggatgagcagtggctgattgaatcactttctgactccactatttacatggcattttacacagttgcacacctattgcaggggggtaacttgcatggacaggcagagtctccgctgggcattagaccgcaacagatgaccaaggaagtttgggattatgttttcttcaaggaggctccatttcctaagactcagattgcaaaggaaaaattagatcagttaaagcaggagtttgaattctggtatcctgttgatcttcgcgtctctggcaaggatcttgttccaaatcatctttcatattacctttataatcatgtggctatgtggccggaacaaagtgataaatggcctacagctgtgagagcaaatggacatctcctcctgaactctgagaagatgtcaaaatccacaggcaacttcctcactttgacccaagctattgacaaattttcagcagatggaatgcgtttggctctggctgatgctggtgacactgtagaagatgccaactttgtggaagccatggcagatgcaggtattctccgtctgtacacctgggtagagtgggtgaaagaaatggttgccaactgggacagcctaagaagtggtcctgccagcactttcaatgatagagtttttgccagtgaattgaatgcaggaattataaaaacagatcaaaactatgaaaagatgatgtttaaagaagctttgaaaacagggttttttgagtttcaggccgcaaaagataagtaccgtgaattggctgtggaagggatgcacagagaacttgtgttccggtttattgaagttcagacacttctcctcgctccattctgtccacatttgtgtgagcacatctggacactcctgggaaagcctgactcaattatgaatgcttcatggcctgtggcaggtcctgtggatgaagttttaatacactcctcacagtatcttatggaagtaacacatgaccttagactacgactcaagaactatatgatgccagctaaagggaagaagaccgacaaacaacccctgcagaagccctcacattgcaccatctatgtggcaaagaactatccaccttggcaacataccaccctgtctgttctacgtaaacactttgaggccaataacggaaaactgcctgacaacaaagtcattgctagtgaactaggcagtatgccagaactgaagaaatacatgaagaaagtcatgccatttgttgccatgattaaggaaaatctggagaagatggggcctcgtattctggatttgcaattagaatttgatgaaaaggctgtgcttatggagaatatagtctatctgactaattcgcttgagctagaacacatagaagtcaagtttgcctccgaagcagaagataaaatcagggaagactgctgtcctgggaaaccacttaatgtttttagaatagaacctggtgtgtccgtttctctggtgaatccccagccatccaatggccacttctcaaccaaaattgaaatcaagcaaggagataactgtgattccataatcaggcgtttaatgaaaatgaatcgaggaattaaagacctttccaaagtgaaactgatgagatttgatgatccactgttggggcctcgacgagttcctgtcctgggaaaggagtacaccgagaagacccccatttctgagcatgctgttttcaatgtggacctcatgagcaagaaaattcatctgactgagaatgggataagggtggatattggcgatacaataatctatctggttcattaaactcatgcacattggagatttatcctggtttcttaggaatactactactctgattgtgtctactgattggctatcagaaccttaggctggacctaaatagattgatttcatttctaaccatccaattctgcatgtattcataattctatcaagtcatctttgattcctggacctaataaattttttttccctttctttgggtgtccaagagaaatggtttttgccaaactctttttaaaaaacaaattgttgctatttcctagaagtttctggtttttaagatgaacataaaagtgtcagtatgcttccttttatgaggtgtactttatactttgatgaaggctaaggtgtacctaacagctttttatagtatattcatttatggagttagctgtattttttttaaaaaaagaaaagtagtaaattagcagctttttttttttttaaatgaagagaacttcatgatgatttaaaagaactaatgagaatattttgacttgacttcaattactaagtattttgtataaagaacaaataggtcctgcattttataagactttttaaagctttaattattcaactaagaaccaataatggcttcttcaaggctaatatcaatagtttataagcagtatatttcaccta

SEQ ID NO: 30 - DNA, 2567 bp, Homo sapiens
ctccggcgcagtgttgggactgtctgggtatcggaaagcaagcctacgttgctcactattacgtataatccttttcttttcaagatgcctgaggaagtgcaccatggagaggaggaggtggagacttttgcctttcaggcagaaattgcccaactcatgtccctcatcatcaataccttctattccaacaaggagattttccttcgggagttgatctctaatgcttctgatgccttggacaagattcgctatgagagcctgacagacccttcgaagttggacagtggtaaagagctgaaaattgacatcatccccaaccctcaggaacgtaccctgactttggtagacacaggcattggcatgaccaaagctgatctcataaataatttgggaaccattgccaagtctggtactaaagcattcatggaggctcttcaggctggtgcagacatctccatgattgggcagtttggtgttggcttttattctgcctacttggtggcagagaaagtggttgtgatcacaaagcacaacgatgatgaacagtatgcttgggagtcttctgctggaggttccttcactgtgcgtgctgaccatggtgagcccattggcaggggtaccaaagtgatcctccatcttaaagaagatcagacagagtacctagaagagaggcgggtcaaagaagtagtgaagaagcattctcagttcataggctatcccatcaccctttatttggagaaggaacgagagaaggaaattagtgatgatgaggcagaggaagagaaaggtgagaaagaagaggaagataaagatgatgaagaaaaacccaagatcgaagatgtgggttcagatgaggaggatgacagcggtaaggataagaagaagaaaactaagaagatcaaagagaaatacattgatcaggaagaactaaacaagaccaagcctatttggaccagaaaccctgatgacatcacccaagaggagtatggagaattctacaagagcctcactaatgactgggaagaccacttggcagtcaagcacttttctgtagaaggtcagttggaattcagggcattgctatttattcctcgtcgggctccctttgacctttttgagaacaagaagaaaaagaacaacatcaaactctatgtccgccgtgtgttcatcatggacagctgtgatgagttgataccagagtatctcaattttatccgtggtgtggttgactctgaggatctgcccctgaacatctcccgagaaatgctccagcagagcaaaatcttgaaagtcattcgcaaaaacattgttaagaagtgccttgagctcttctctgagctggcagaagacaaggagaattacaagaaattctatgaggcattctctaaaaatctcaagcttggaatccacgaagactccactaaccgccgccgcctgtctgagctgctgcgctatcatacctcccagtctggagatgagatgacatctctgtcagagtatgtttctcgcatgaaggagacacagaagtccatctattacatcactggtgagagcaaagagcaggtggccaactcagcttttgtggagcgagtgcggaaacggggcttcgaggtggtatatatgaccgagcccattgacgagtactgtgtgcagcagctcaaggaatttgatgggaagagcctggtctcagttaccaaggagggtctggagctgcctgaggatgaggaggagaagaagaagatggaagagagcaaggcaaagtttgagaacctctgcaagctcatgaaagaaatcttagataagaaggttgagaaggtgacaatctccaatagacttgtgtcttcaccttgctgcattgtgaccagcacctacggctggacagccaatatggagcggatcatgaaagcccaggcacttcgggacaactccaccatgggctatatgatggccaaaaagcacctggagatcaaccctgaccaccccattgtggagacgctgcggcagaaggctgaggccgacaagaatgataaggcagttaaggacctggtggtgctgctgtttgaaaccgccctgctatcttctggcttttcccttgaggatccccagacccactccaaccgcatctatcgcatgatcaagctaggtctaggtattgatgaagatgaagtggcagcagaggaacccaatgctgcagttcctgatgagatcccccctctcgagggcgatgaggatgcgtctcgcatggaagaagtcgattaggttaggagttcatagttggaaaacttgtgcccttgtatagtgtccccatgggctcccactgcagcctcgagtgcccctgtcccacctggctccccctgctggtgtctagtgtttttttccctctcctgtccttgtgttgaaggcagtaaactaagggtgtcaagccccattccctctctactcttgacagcaggattggatgttgtgtattgtggtttattttattttcttcattttgttctgaaattaaagtatgcaaaataaagaatatgccgttttaaaaaaaaaaaaaaaaaaaaaaaaaaaaa

SEQ ID NO: 31 - DNA, 2600 bp, Homo sapiens
ggttaggaagagtggagactgctgcacggactctggaaccatgaacatatttgatcgaaagatcaactttgatgcgcttttaaaattttctcatataaccccgtcaacgcagcagcacctgaagaaggtctatgcaagttttgccctttgtatgtttgtggcggctgcaggggcctatgtccatatggtcactcatttcattcaggctggcctgctgtctgccttgggctccctgatattgatgatttggctgatggcaacacctcatagccatgaaactgaacagaaaagactgggacttcttgctggatttgcattccttacaggagttggcctgggccctgccctggagttttgtattgctgtcaaccccagcatccttcccactgctttcatgggcacagcaatgatctttacctgcttcaccctcagtgcactctatgccaggcgccgtagctacctctttctgggaggtatcttgatgtcagccctgagcttgttgcttttgtcttccctggggaatgttttctttggatccatttggcctttccaggcaaacctgtatgtgggactggtggtcatgtgtggcttcgtccttgttgatactcaactcattattgaaaaggccgaacatggagatcaagattatatctggcactgcattgatctcttcttagatttcattactgtcttcagaaaactcatgatgatcctggccatgaatgaaaaggataagaagaaagagaagaaatgaagtgaccatccagcctttcccaattagacttcctctccttccacccctcatttcctttttgcacacattacaggtggtgtgttctgtgataatgaaaagcatcagaaaagcttttgtactttgtggtttcctctattttgaattttttgatcaaaaaactgattagcagaatatagtttggagtttggcttcatcttcctggggttcccctcactcccttttttgtcaaccccatctgtagcctcttcctctactcaggcagtcgacccgccacgatgagaagtgggaccagccagagggcgccaacttcaggagtccgctttcccaccaggcttcattcacccagtggacctgaactgtttggtagagccacccggcccttccttcctcattgttgtttggtatgcgcacagttcctgtgggactgggccgtgagttttccattggaaagaagttcagtggtcccattgttaactcagcctcaaatctcaactgtcaggccctacaaagaaaatggagagcctcttctggtggatgctttgctccctctgagctgcccatgctggtctggcaaacacacctttctgctttgccttcacaaaagtaatgtgttccctttcccgccccttgcctgaccctcagggagtcagcctgcttccatccatgggtgggaagacttcagcacaaaggaaagactaattcttgtcaggcatttttgaaaaggctgattatgtgtatcaaggtacagctacgtaggttcccctaaacttgccctgtttttgtttttttagtttgttatccccttactgagcggcctctactaggtggctgtgattaaatgtcccaagcaaggatagggaaggggaatggttgagcctctggagatcattgtaaccaatcctgccagacctgtttggggcagtggggagcaaacctagataaggacctgtttggggcagcagggagcaaaatctcctttaacaaccaagcagttcctcattcacatcaacagagcgaggctgtgataacttaggaggcagcaatcctaatagtccttcagtgcattttagtctgtctccaactggacaccagtaggtagtgtcaagccagagattcggggcagtagataaatgttcattttactgatgcactttagtttttggtctgttacctgttttccagaaatttgtggccttttaggcgggagttaggcgaccaaaccagtgagagccccaatccctgcagttttgtggcttcaagtgtgggtggacagtcctaatggggatctccagctccttcctgtgggctgccacagacagctacccccagaagggtcaatgttgggagtggttgtggctctgagctgctctacagagcttcagtgtgagaggatcgagccattgaaagctcattaccagtaggacataatttttggctctccctattcacaaccagtgcacagtttgacagtggcctcaggttcacagtgcaccatgtcactgtgctatcctacgaaatcatttgtttctaagttgtgtttattcctggagtgacatgccaccccgaatggctcactttcactgaggatgctgtcctctgatttagctgctgcctccagcctctggcttgagaacttactaaaggcacttccttcctgttaaacccctgttaactctccataaatttggtgattctctgctaggcctaagattttgagttaacatctcttgaagccaaactccaccttctgtgctttttgcttgggataatggagtttttctttagaaacagtgccaagaatgacaagatattaaaaaaaaaaaaaaaaaaaaaaaaaaaaaaaaaa

SEQ ID NO: 32 - DNA, 1390 bp, Homo sapiens
gggaagtgctgttggagccgctgtggttgctgtccgcggagtggaagcgcgtgcttttgtttgtgtccctggccatggcgctgcagctctcccgggagcagggaatcaccctgcgcgggagcgccgaaatcgtggccgagttcttctcattcggcatcaacagcattttatatcagcgtggcatatatccatctgaaacctttactcgagtgcagaaatacggactcaccttgcttgtaactactgatcttgagctcataaaatacctaaataatgtggtggaacaactgaaagattggttatacaagtgttcagttcagaaactggttgtagttatctcaaatattgaaagtggtgaggtcctggaaagatggcagtttgatattgagtgtgacaagactgcaaaagatgacagtgcacccagagaaaagtctcagaaagctatccaggatgaaatccgttcagtgatcagacagatcacagctacggtgacatttctgccactgttggaagtttcttgttcatttgatctgctgatttatacagacaaagatttggttgtacctgaaaaatgggaagagtcgggaccacagtttattaccaattctgaggaagtccgccttcgttcatttactactacaatccacaaagtaaatagcatggtggcctacaaaattcctgtcaatgactgaggatgacatgaggaaaataatgtaattgtaattttgaaatgtggttttcctgaaatcaggtcatctatagttgatatgttttatttcattggttaatttttacatggagaaaaccaaaatgatacttactgaactgtgtgtaattgttcctttatttttttggtacctatttgacttaccatggagttaacatcatgaatttattgcacattgttcaaaaggaaccaggaggtttttttgtcaacattgtgatgtatattcctttgaagatagtaactgtagatggaaaaacttgtgctataaagctagatgctttcctaaatcagatgttttggtcaagtagtttgactcagtataggtagggagatatttaagtataaaatacaacaaaggaagtctaaatattcagaatctttgttaaggtcctgaaagtaactcataatctataaacaatgaaatattgctgtatagctccttttgaccttcatttcatgtatagttttccctattgaatcagtttccaattatttgactttaatttatgtaacttgaacctatgaagcaatggatatttgtactgtttaatgttctgtgatacagaactcttaaaaatgttttttcatgtgttttataaaatcaagttttaagtgaaagtgaggaaataaagttaagtttgttttaaaaaaaaaaaaaaaaaa

SEQ ID NO: 33 - DNA, 2693 bp, Homo sapiens
cgaaaaaagaggggaagagtattaaagaccatttctggctgggcagggcactctcagcagctcaactgcccagcgtgaccagtggccacctctgcagtgtcttccacaacctggtcttgactcgtctgctgaacaaatcctctgacctcaggccggctgtgaacgtagttcctgagagatagcaaacatgcccaacagtgagcccgcatctctgctggagctgttcaacagcatcgccacacaaggggagctcgtaaggtccctcaaagcgggaaatgcgtcaaaggatgaaattgattctgcagtaaagatgttggtgtcattaaaaatgagctacaaagctgccgcgggggaggattacaaggctgactgtcctccagggaacccagcacctaccagtaatcatggcccagatgccacagaagctgaagaggattttgtggacccatggacagtacagacaagcagtgcaaaaggcatagactacgataagctcattgttcggtttggaagtagtaaaattgacaaagagctaataaaccgaatagagagagccaccggccaaagaccacaccacttcctgcgcagaggcatcttcttctcacacagagatatgaatcaggttcttgatgcctatgaaaataagaagccattttatctgtacacgggccggggcccctcttctgaagcaatgcatgtaggtcacctcattccatttattttcacaaagtggctccaggatgtatttaacgtgcccttggtcatccagatgacggatgacgagaagtatctgtggaaggacctgaccctggaccaggcctatggcgatgctgttgagaatgccaaggacatcatcgcctgtggctttgacatcaacaagactttcatattctctgacctggactacatggggatgagctcaggtttctacaaaaatgtggtgaagattcaaaagcatgttaccttcaaccaagtgaaaggcattttcggcttcactgacagcgactgcattgggaagatcagttttcctgccatccaggctgctccctccttcagcaactcattcccacagatcttccgagacaggacggatatccagtgccttatcccatgtgccattgaccaggatccttactttagaatgacaagggacgtcgcccccaggatcggctatcctaaaccagccctgttgcactccaccttcttcccagccctgcagggcgcccagaccaaaatgagtgccagcgacccaaactcctccatcttcctcaccgacacggccaagcagatcaaaaccaaggtcaataagcatgcgttttctggagggagagacaccatcgaggagcacaggcagtttgggggcaactgtgatgtggacgtgtctttcatgtacctgaccttcttcctcgaggacgacgacaagctcgagcagatcaggaaggattacaccagcggagccatgctcaccggtgagctcaagaaggcactcatagaggttctgcagcccttgatcgcagagcaccaggcccggcgcaaggaggtcacggatgagatagtgaaagagttcatgactccccggaagctgtccttcgactttcagtagcactcgttttacatatgcttataaaagaagtgatgtatcagtaatgtatcaataatcccagcccagtcaaagcaccgccacctgtaggcttctgtctcatggtaattactgggcctggcctctgtaagcctgtgtatgttatcaatactgtttcttcctgtgagttccattatttctatctcttatgggcaaagcattgtgggtaattggtgctggctaacattgcatggtcggatagagaagtccagctgtgagtctctccccaaagcagccccacagtggagccttcggctggaagtccatgggccaccctgttcttgtccatggaggacttccgagggttccaagtatactcttaagacccactctgtttaaaaatatatattctatgtatgcgtatatggaattgaaatgtcattattgtaacctagaaagtgctttgaaatattgatgtggggaggtttattgagcacaagatgtatttcagcccatgccccctcccaaaaagaaattgataagtaaaagcttcgttatacatttgactaagaaatcacccagctttaaagctgcttttaacaatgaagattgaacagagttcagcaattttgattaaattaagacttgggggtgaaactttccagtttactgaactccagaccatgcatgtagtccactccagaaatcatgctcgcttcccttggcacaccagtgttctcctgccaaatgaccctagaccctctgtcctgcagagtcagggtggcttttcccctgactgtgtccgatgccaaggagtcctggcctccgcagatgcttcattttgacccttggctgcagtggaagtcagcacagagcagtgccctggctgtgtcctggacgggtggacttagctagggagaaagtcgaggcagcagccctcgaggccctcacagatgtctaggcaggcctcatttcatcacgcagcatgtgcaggcctggaagagcaaagccaaatctcagggaagtccttggttgatgtatctgggtctcctctggagcactctgccctcctgtcacccagtagagtaaataaacttccttggctcctaaaaaa

SEQ ID NO: 34 - DNA, 1350 bp, Homo sapiens
ccctggtgtgattccgtcctgcgcggttgttctctggagcagcgttcttttatctccgtccgccttctctcctacctaagtgcgtgccgccacccgatggaagattcgatggacatggacatgagccccctgaggccccagaactatcttttcggttgtgaactaaaggccgacaaagattatcactttaaggtggataatgatgaaaatgagcaccagttatctttaagaacggtcagtttaggggctggtgcaaaggatgagttgcacattgttgaagcagaggcaatgaattacgaaggcagtccaattaaagtaacactggcaactttgaaaatgtctgtacagccaacggtttcccttgggggctttgaaataacaccaccagtggtcttaaggttgaagtgtggttcagggccagtgcatattagtggacagcacttagtagctgtggaggaagatgcagagtcagaagatgaagaggaggaggatgtgaaactcttaagtatatctggaaagcggtctgcccctggaggtggtagcaaggttccacagaaaaaagtaaaacttgctgctgatgaagatgatgacgatgatgatgaagaggatgatgatgaagatgatgatgatgatgattttgatgatgaggaagctgaagaaaaagcgccagtgaagaaatctatacgagatactccagccaaaaatgcacaaaagtcaaatcagaatggaaaagactcaaaaccatcatcaacaccaagatcaaaaggacaagaatccttcaagaaacaggaaaaaactcctaaaacaccaaaaggacctagttctgtagaagacattaaagcaaaaatgcaagcaagtatagaaaaaggtggttctcttcccaaagtggaagccaaattcatcaattatgtgaagaattgcttccggatgactgaccaagaggctattcaagatctctggcagtggaggaagtctctttaagaaaatagtttaaacaatttgttaaaaaattttccgtcttatttcatttctgtaacagttgatatctggctgtcctttttataatgcagagtgagaactttccctaccgtgtttgataaatgttgtccaggttctattgccaagaatgtgttgtccaaaatgcctgtttagtttttaaagatggaactccaccctttgcttggttttaagtatgtatggaatgttatgataggacatagtagtagcggtggtcagacatggaaatggtggggagacaaaaatatacatgtgaaataaaactcagtattttaataaagtaaaaaaaaaaaaaaaaaaaaaaaaaaaaaaaaaaaaaaaaaaaaaaaaaaa

SEQ ID NO: 35 - protein, 158 aa, Homo sapiens
MASRSMRLLLLLSCLAKTGVLGDIIMRPSCAPGWFYHKSNCYGYFRKLRNWSDAELECQSYGNGAHLASILSLKEASTIAEYISGYQRSQPIWIGLHDPQKRQQWQWIDGAMYLYRSWSGKSMGGNKHCAEMSSNNNFLTWSSNECNKRQHFLCKYRP

SEQ ID NO: 36 - protein, 175 aa, Homo sapiens
MEKIPVSAFLLLVALSYTLARDTTVKPGAKKDTKDSRPKLPQTLSRGWGDQLIWTQTYEEALYKSKTSNKPLMIIHHLDECPHSQALKKVFAENKEIQKLAEQFVLLNLVYETTDKHLSPDGQYVPRIMFVDPSLTVRADITGRYSNRLYAYEPADTALLLDNMKKALKLLKTEL

SEQ ID NO: 37 - protein, 317 aa, Homo sapiens [sequence omitted]

SEQ ID NO: 38 - protein, 229 aa, Homo sapiens
MQIFVKTLTGKTITLEVEPSDTIENVKAKIQDKEGIPPDQQRLIFAGKQLEDGRTLSDYNIQKESTLHLVLRLRGGMQIFVKTLTGKTITLEVEPSDTIENVKAKIQDKEGIPPDQQRLIFAGKQLEDGRTLSDYNIQKESTLHLVLRLRGGMQIFVKTLTGKTITLEVEPSDTIENVKAKIQDKEGIPPDQQRLIFAGKQLEDGRTLSDYNIQKESTLHLVLRLRGGC

SEQ ID NO: 39 - protein, 165 aa, Homo sapiens
MVNPTVFFDIAVDGEPLGRVSFELFADKVPKTAENFRALSTGEKGFGYKGSCFHRIIPGFMCQGGDFTRHNGTGGKSIYGEKFEDENFILKHTGPGILSMANAGPNTNGSQFFICTAKTEWLDGKHVVFGKVKEGMNIVEAMERFGSRNGKTSKKITIADCGQLE

SEQ ID NO: 40 - protein, 103 aa, Homo sapiens [sequence omitted]

SEQ ID NO: 41 - protein, 425 aa, Homo sapiens
MATAEVLNIGKKLYEGKTKEVYELLDSPGKVLLQSKDQITAGNAARKNHLEGKAAISNKITSCIFQLLQEAGIKTAFTRKCGETAFIAPQCEMIPIEWVCRRIATGSFLKRNPGVKEGYKFYPPKVELFFKDDANNDPQWSEEQLIAAKFCFAGLLIGQTEVDIMSHATQAIFEILEKSWLPQNCTLVDMKIEFGVDVTTKEIVLADVIDNDSWRLWPSGDRSQQKDKQSYRDLKEVTPEGLQMVKKNFEWVAERVELLLKSESQCRVVVLMGSTSDLGHCEKIKKACGNFGIPCELRVTSAHKGPDETLRIKAEYEGDGIPTVFVAVAGRSNGLGPVMSGNTAYPVISCPPLTPDWGVQDVWSSLRLPSGLGCSTVLSPEGSAQFAAQIFGLSNHLVWSKLRASILNTWISLKQADKKIRECNL

SEQ ID NO: 42 - protein, 683 aa, Homo sapiens
MALFVRLLALALALALGPAATLAGPAKSPYQLVLQHSRLRGRQHGPNVCAVQKVIGTNRKYFTNCKQWYQRKICGKSTVISYECCPGYEKVPGEKGCPAALPLSNLYETLGVVGSTTTQLYTDRTEKLRPEMEGPGSFTIFAPSNEAWASLPAEVLDSLVSNVNIELLNALRYHMVGRRVLTDELKHGMTLTSMYQNSNIQIHHYPNGIVTVNCARLLKADHHATNGVVHLIDKVISTITNNIQQIIEIEDTFETLRAAVAASGLNTMLEGNGQYTLLAPTNEAFEKIPSETLNRILGDPEALRDLLNNHILKSAMCAEAIVAGLSVETLEGTTLEVGCSGDMLTINGKAIISNKDILATNGVIHYIDELLIPDSAKTLFELAAESDVSTAIDLFRQAGLGNHLSGSERLTLLAPLNSVFKDGTPPIDAHTRNLLRNHIIKDQLASKYLYHGQTLETLGGKKLRVFVYRNSLCIENSCIAAHDKRGRYGTLFTMDRVLTPPMGTVMDVLKGDNRFSMLVAAIQSAGLTETLNREGVYTVFAPTNEAFRALPPRERSRLLGDAKELANILKYHIGDEILVSGGIGALVRLKSLQGDKLEVSLKNNVVSVNKEPVAEPDIMATNGVVHVITNVLQPPANRPQERGDELADSALEIFKQASAFSRASQRSVRLAPVYQKLLERMKH

SEQ ID NO: 43 - protein, 480 aa, Homo sapiens
MAASVVCRAATAGAQVLLRARRSPALLRTPALRSTATFAQALQFVPETQVSLLDNGLRVASEQSSQPTCTVGVWIDVGSRFETEKNNGAGYFLEHLAFKGTKNRPGSALEKEVESMGAHLNAYSTREHTAYYIKALSKDLPKAVELLGDIVQNCSLEDSQIEKERDVILREMQENDASMRDVVFNYLHATAFQGTPLAQAVEGPSENVRKLSRADLTEYLSTHYKAPRMVLAAAGGVEHQQLLDLAQKHLGGIPWTYAEDAVPTLTPCRFTGSEIRHRDDALPFAHVAIAVEGPGWASPDSVALQVANAIIGHYDCTYGGGVHLSSPLASGAVANKLCQSFQTFSICYAETGLLGAHFVCDRMKIDDMMFVLQGQWMRLCTSATESEVARGKNILRNALVSHLDGTTPVCEDIGRSLLTYGRRIPLAEWESRIAEVDASVVREICSKYIYDQCPAVAGYGPIEQLPDYNRIRSGMFWLRF

SEQ ID NO: 44 - protein, 1466 aa, Homo sapiens
MMSFVQKGSWLLLALLHPTIILAQQEAVEGGCSHLGQSYADRDVWKPEPCQICVCDSGSVLCDDIICDDQELDCPNPEIPFGECCAVCPQPPTAPTRPPNGQGPQGPKGDPGPPGIPGRNGDPGIPGQPGSPGSPGPPGICESCPTGPQNYSPQYDSYDVKSGVAVGGLAGYPGPAGPPGPPGPPGTSGHPGSPGSPGYQGPPGEPGQAGPSGPPGPPGAIGPSGPAGKDGESGRPGRPGERGLPGPPGIKGPAGIPGFPGMKGHRGFDGRNGEKGETGAPGLKGENGLPGENGAPGPMGPRGAPGERGRPGLPGAAGARGNDGARGSDGQPGPPGPPGTAGFPGSPGAKGEVGPAGSPGSNGAPGQRGEPGPQGHAGAQGPPGPPGINGSPGGKGEMGPAGIPGAPGLMGARGPPGPAGANGAPGLRGGAGEPGKNGAKGEPGPRGERGEAGIPGVPGAKGEDGKDGSPGEPGANGLPGAAGERGAPGFRGPAGPNGIPGEKGPAGERGAPGPAGPRGAAGEPGRDGVPGGPGMRGMPGSPGGPGSDGKPGPPGSQGESGRPGPPGPSGPRGQPGVMGFPGPKGNDGAPGKNGERGGPGGPGPQGPPGKNGETGPQGPPGPTGPGGDKGDTGPPGPQGLQGLPGTGGPPGENGKPGEPGPKGDAGAPGAPGGKGDAGAPGERGPPGLAGAPGLRGGAGPPGPEGGKGAAGPPGPPGAAGTPGLQGMPGERGGLGSPGPKGDKGEPGGPGADGVPGKDGPRGPTGPIGPPGPAGQPGDKGEGGAPGLPGIAGPRGSPGERGETGPPGPAGFPGAPGQNGEPGGKGERGAPGEKGEGGPPGVAGPPGGSGPAGPPGPQGVKGERGSPGGPGAAGFPGARGLPGPPGSNGNPGPPGPSGSPGKDGPPGPAGNTGAPGSPGVSGPKGDAGQPGEKGSPGAQGPPGAPGPLGIAGITGARGLAGPPGMPGPRGSPGPQGVKGESGKPGANGLSGERGPPGPQGLPGLAGTAGEPGRDGNPGSDGLPGRDGSPGGKGDRGENGSPGAPGAPGHPGPPGPVGPAGKSGDRGESGPAGPAGAPGPAGSRGAPGPQGPRGDKGETGERGAAGIKGHRGFPGNPGAPGSPGPAGQQGAIGSPGPAGPRGPVGPSGPPGKDGTSGHPGPIGPPGPRGNRGERGSEGSPGHPGQPGPPGPPGAPGPCCGGVGAAAIAGIGGEKAGGFAPYYGDEPMDFKINTDEIMTSLKSVNGQIESLISPDGSRKNPARNCRDLKFCHPELKSGEYWVDPNQGCKLDAIKVFCNMETGETCISANPLNVPRKHWWTDSSAEKKHVWFGESMDGGFQFSYGNPELPEDVLDVQLAFLRLLSSRASQNITYHCKNSIAYMDQASGNVKKALKLMGSNEGEFKAEGNSKFTYTVLEDGCTKHTGEWSKTVFEYRTRKAVRLPIVDIAPYDIGGPDQEFGVDVGPVCFL

SEQ ID NO: 45 - protein, 323 aa, Homo sapiens
MASIWVGHRGTVRDYPDFSPSVDAEAIQKAIRGIGTDEKMLISILTERSNAQRQLIVKEYQAAYGKELKDDLKGDLSGHFEHLMVALVTPPAVFDAKQLKKSMKGAGTNEDALIEILTTRTSRQMKDISQAYYTVYKKSLGDDISSETSGDFRKALLTLADGRRDESLKVDEHLAKQDAQILYKAGENRWGTDEDKFTEILCLRSFPQLKLTFDEYRNISQKDIVDSIKGELSGHFEDLLLAIVNCVRNTPAFLAERLHRALKGIGTDEFTLNRIMVSRSEIDLLDIRTEFKKHYGYSLYSAIKSDTSGDYEITLLKICGGDD

SEQ ID NO: 46 - protein, 1211 aa, Homo sapiens
MPAPEQASLVEEGQPQTRQEAASTGPGMEPETTATTILASVKEQELQFQRLTRELEVERQIVASQLERCRLGAESPSIASTSSTEKSFPWRSTDVPNTGVSKPRVSDAVQPNNYLIRTEPEQGTLYSPEQTSLHESEGSLGNSRSSTQMNSYSDSGYQEAGSFHNSQNVSKADNRQQHSFIGSTNNHVVRNSRAEGQTLVQPSVANRAMRRVSSVPSRAQSPSYVISTGVSPSRGSLRTSLGSGFGSPSVTDPRPLNPSAYSSTTLPAARAASPYSQRPASPTAIRRIGSVTSRQTSNPNGPTPQYQTTARVGSPLTLTDAQTRVASPSQGQVGSSSPKRSGMTAVPQHLGPSLQRTVHDMEQFGQQQYDIYERMVPPRPDSLTGLRSSYASQHSQLGQDLRSAVSPDLHITPIYEGRTYYSPVYRSPNHGTVELQGSQTALYRTGVSGIGNLQRTSSQRSTLTYQRNNYALNTTATYAEPYRPIQYRVQECNYNRLQHAVPADDGTTRSPSIDSIQKDPREFAWRDPELPEVIHMLEHQFPSVQANAAAYLQHLCFGDNKVKMEVCRLGGIKHLVDLLDHRVLEVQKNACGALRNLVFGKSTDENKIAMKNVGGIPALLRLLRKSIDAEVRELVTGVLWNLSSCDAVKMTIIRDALSTLTNTVIVPHSGWNNSSFDDDHKIKFQTSLVLRNTTGCLRNLTSAGEEARKQMRSCEGLVDSLLYVIHTCVNTSDYDSKTVENCVCTLRNLSYRLELEVPQARLLGLNELDDLLGKESPSKDSEPSCWGKKKKKKKRTPQEDQWDGVGPIPGLSKSPKGVEMLWHPSVVKPYLTLLAESSNPATLEGSAGSLQNLSASNWKFAAYIRGGRPKRKGLPILVELLRMDNDRVVSSGATALRNMALDVRNKELIGKYAMRDLVNRLPGGNGPSVLSDETMAAICCALHEVTSKNMENAKALADSGGIEKLVNITKGRGDRSSLKVVKAAAQVLNTLWQYRDLRSIYKKDGWNQNHFITPVSTLERDRFKSHPSLSTTNQQMSPIIQSVGSTSSSPALLGIRDPRSEYDRTQPPMQYYNSQGDATHKGLYPGSSKPSPIYISSYSSPAREQNRRLQHQQLYYSQDDSNRKNFDAYRLYLQSPHSYEDPYFDDRVHFPASTDYSTQYGLKSTTNYVDFYSTKRPSYRAEQYPGSPDSWVYDQDAQQRNSFFLTLFRLR

SEQ ID NO: 47 - protein, 96 aa, Homo sapiens
MWIYSKLSKRTVFRKGKTRTQKTLGITTTPKCFRLQEITIHVFAGGHTIFPYYLVQNDSSLPKSFFSNHDFPIYFGPMQSHSLWPIVSLPTTPLGG

SEQ ID NO: 48 - protein, 659 aa, Homo sapiens
MPSEGRCWETLKALRSSDKGRLCYYRDWLLRREDVLEECMSLPKLSSYSGWVVEHVLPHMQENQPLSETSPSSTSASALDQPSFVPKSPDASSAFSPASPATPNGTKGKDESQHTESMVLQSSRGIKVEGCVRMYELVHRMKGTEGLRLWQEEQERKVQALSEMASEQLKRFDEWKELKQHKEFQDLREVMEKSSREALGHQEKLKAEHRHRAKILNLKLREAEQQRVKQAEQERLRKEEGQIRLRALYALQEEMLQLSQQLDASEQHKALLKVDLAAFQTRGNQLCSLISGIIRASSESSYPTAESQAEAERALREMRDLLMNLGQEITRACEDKRRQDEEEAQVKLQEAQMQQGPEAHKEPPAPSQGPGGKQNEDLQVKVQDITMQWYQQLQDASMQCVLTFEGLTNSKDSQAKKIKMDLQKAATIPVSQISTIAGSKLKEIFDKIHSLLSGKPVQSGGRSVSVTLNPQGLDFVQYKLAEKFVKQGEEEVASHHEAAFPIAVVASGIWELHPRVGDLILAHLHKKCPYSVPFYPTFKEGMALEDYQRMLGYQVKDSKVEQQDNFLKRMSGMIRLYAAIIQLRWPYGNRQEIHPHGLNHGWRWLAQILNMEPLSDVTATLLFDFLEVCGNALMKQYQVQFWKMLILIKEDYFPRYQAC

SEQ ID NO: 49 - protein, 544 aa, Homo sapiens
MGHRPVLVLSQNTKRESGRKVQSGNINAAKTIADIIRTCLGPKSMMKMLLDPMGGIVMTNDGNAILREIQVQHPAAKSMIEISRTQDEEVGDGTTSVIILAGEMLSVAEHFLEQQMHPTVVISAYRKALDDMISTLKKISIPVDISDSDMMLNIINSSITTKAISRWSSLACNIALDAVKMVQFEENGRKEIDIKKYARVEKIPGGIIEDSCVLRGVMINKDVTHPRMRRYIKNPRIVLLDSSLEYKKGESQTDIEITREEDFTRILQMEEEYIQQLCEDIIQLKPDVVITEKGISDLAQHYLMRANITAIRRVRKTDNNRIARACGARIVSRPEELREDDVGTGAGLLEIKKIGDEYFTFITDCKDPKACTILLRGASKEILSEVERNLQDAMQVCRNVLLDPQLVPGGGASEMAVAHALTEKSKAMTGVEQWPYRAVAQALEVIPRTLIQNCGASTIRLLTSLRAKHTQENCETWGVNGETGTLVDMKELGIWEPLAVKLQTYKTAVETAVLLLRIDDIVSGHKKKGDDQSRQGGAPDAGQE

SEQ ID NO: 50 - protein, 125 aa, Homo sapiens
MAMQAAKRANIRLPPEVNRILYIRNLPYKITAEEMYDIFGKYGPIRQIRVGNTPETRGTAYVVYEDIFDAKNACDHLSGFNVCNRYLVVLYYNANRAFQKMDTKKKEEQLKLLKEKYGINTDPPK

SEQ ID NO: 51 - protein, 462 aa, Homo sapiens
MGKEKTHINIVVIGHVDSGKSTTTGHLIYKCGGIDKRTIEKFEKEAAEMGKGSFKYAWVLDKLKAERERGITIDISLWKFETSKYYVTIIDAPGHRDFIKNMITGTSQADCAVLIVAAGVGEFEAGISKNGQTREHALLAYTLGVKQLIVGVNKMDSTEPPYSQKRYEEIVKEVSTYIKKIGYNPDTVAFVPISGWNGDNMLEPSANMPWFKGWKVTRKDGNASGTTLLEALDCILPPTRPTDKPLRLPLQDVYKIGGIGTVPVGRVETGVLKPGMVVTFAPVNVTTEVKSVEMHHEALSEALPGDNVGFNVKNVSVKDVRRGNVAGDSKNDPPMEAAGFTAQVIILNHPGQISAGYAPVLDCHTAHIACKFAELKEKIDRRSGKKLEDGPKFLKSGDAAIVDMVPGKPMCVESFSDYPPLGRFAVRDMRQTVAVGVIKAVDKKAAGAGKVTKSAQKAQKAK

SEQ ID NO: 52 - protein, 325 aa, Homo sapiens
MKPILLQGHERSITQIKYNREGDLLFTVAKDPIVNVWYSVNGERLGTYMGHTGAVWCVDADWDTKHVLTGSADNSCRLWDCETGKQLALLKTNSAVRTCGFDFGGNIIMFSTDKQMGYQCFVSFFDLRDPSQIDNNEPYMKIPCNDSKITSAVWGPLGECIIAGHESGELNQYSAKSGEVLVNVKEHSRQINDIQLSRDMTMFVTASKDNTAKLFDSTTLEHQKTFRTERPVNSAALSPNYDHVVLGGGQEAMDVTTTSTRIGKFEARFFHLAFEEEFGRVKGHFGPINSVAFHPDGKSYSSGGEDGYVRIHYFDPQYFEFEFEA

SEQ ID NO: 53 - protein, 174 aa, Homo sapiens
MSSAAADHWAWLLVLSFVFGCNVLRILLPSFSSFMSRVLQKDAEQESQMRAEIQDMKQELSTVNMMDEFARYARLERKINKMTDKLKTHVKARTAQLAKIKWVISVAFYVLQAALMISLIWKYYSVPVAVVPSKWITPLDRLVAFPTRVAGGVGITCWILVCNKVVAIVLHPFS

SEQ ID NO: 54 - protein, 366 aa, Homo sapiens
MRVMAPRTLILLLSGALALTETWAGSHSMRYFSTSVSWPGRGEPRFIAVGYVDDTQFVRFDSDAASPRGEPREPWVEQEGPEYWDRETQKYKRQAQADRVNLRKLRGYYNQSEDGSHTLQRMFGCDLGPDGRLLRGYNQFAYDGKDYIALNEDLRSWTAADTAAQITQRKWEAAREAEQRRAYLEGTCVEWLRRYLENGKETLQRAEHPKTHVTHHPVSDHEATLRCWALGFYPAEITLTWQWDGEDQTQDTELVETRPAGDGTFQKWAAVVVPSGEEQRYTCHVQHEGLPEPLTLRWKPSSQPTIPIVGIVAGLAVLAVLAVLGAMVAVVMCRRKSSGGKGGSCSQAASSNSAQGSDESLIACKA

SEQ ID NO: 55 - protein, 1009 aa, Homo sapiens
MSWMFKRDPVWKYLQTVQYGVHGNFPRLSYPTFFPRFEFQDVIPPDDFLTSDEEVDSVLFGSLRGHVVGLRYYTGVVNNNEMVALQRDPNNPYDKNAIKVNNVNGNQVGHLKKELAGALAYIMDNKLAQIEGVVPFGANNAFTMPLHMTFWGKEENRKAVSDQLKKHGFKLGPAPKTLGFNLESGWGSGRAGPSYSMPVHAAVQMTTEQLKTEFDKLFEDLKEDDKTHEMEPAEAIETPLLPHQKQALAWMVSRENSKELPPFWEQRNDLYYNTITNFSEKDRPENVHGGILADDMGLGKTLTAIAVILTNFHDGRPLPIERVKKNLLKKEYNVNDDSMKLGGNNTSEKADGLSKDASRCSEQPSISDIKEKSKFRMSELSSSRPKRRKTAVQYIESSDSEEIETSELPQKMKGKLKNVQSETKGRAKAGSSKVIEDVAFACALTSSVPTTKKKMLKKGACAVEGSKKTDVEERPRTTLIICPLSVLSNWIDQFGQHIKSDVHLNFYVYYGPDRIREPALLSKQDIVLTTYNILTHDYGTKGDSPLHSIRWLRVILDEGHAIRNPNAQQTKAVLDLESERRWVLTGTPIQNSLKDLWSLLSFLKLKPFIDREWWHRTIQRPVTMGDEGGLRRLQSLIKNITLRRTKTSKIKGKPVLELPERKVFIQHITLSDEERKIYQSVKNEGRATIGRYFNEGTVLAHYADVLGLLLRLRQICCHTYLLTNAVSSNGPSGNDTPEELRKKLIRKMKLILSSGSDEECAICLDSLTVPVITHCAHVFCKPCICQVIQNEQPHAKCPLCRNDIHEDNLLECPPEELARDSEKKSDMEWTSSSKINALMHALTDLRKKNPNIKSLVVSQFTTFLSLIEIPLKASGFVFTRLDGSMAQKKRVESIQCFQNTEAGSPTIMLLSLKAGGVGLNLSAASRVFLMDPAWNPAAEDQCFDRCHRLGQKQEVIITKFIVKDSVEENMLKIQNKKRELAAGAFGTKKPNADEMKQAKINEIRTLIDL

SEQ ID NO: 56 - protein, 53 aa, Homo sapiens
MLGVNVAKSSLHLHFLKTLEFRTDVSVTSMPEVAGAIRANHFTPTIVPWGSKT

SEQ ID NO: 57 - protein, 531 aa, Homo sapiens
MAAVKTLNPKAEVARAQAALAVNISAARGLQDVLRTNLGPKGTMKMLVSGAGDIKLTKDGNVLLHEMQIQHPTASLIAKVATAQDDITGDGTTSNVLIIGELLKQADLYISEGLHPRIITEGFEAAKEKALQFLEEVKVSREMDRETLIDVARTSLRTKVHAELADVLTEAVVDSILAIKKQDEPIDLFMIEIMEMKHKSETDTSLIRGLVLDHGARHPDMKKRVEDAYILTCNVSLEYEKTEVNSGFFYKSAEEREKLVKAERKFIEDRVKKIIELKRKVCGDSDKGFVVINQKGIDPFSLDALSKEGIVALRRAKRRNMERLTLACGGVALNSFDDLSPDCLGHAGLVYEYTLGEEKFTFIEKCNNPRSVTLLIKGPNKHTLTQIKDAVRDGLRAVKNAIDDGCVVPGAGAVEVAMAEALIKHKPSVKGRAQLGVQAFADALLIIPKVLAQNSGFDLQETLVKIQAEHSESGQLVGVDLNTGEPMVAAEVGVWDNYCVKKQLLHSCTVIATNILLVDEIMRAGMSSLKG

SEQ ID NO: 58 - protein, 884 aa, Homo sapiens [sequence omitted]

SEQ ID NO: 59 - protein, 514 aa, Homo sapiens
MVLDLDLFRVDKGGDPALIRETQEKRFKDPGLVDQLVKADSEWRRCRFRADNLNKLKNLCSKTIGEKMKKKEPVGDDESVPENVLSFDDLTADALANLKVSQIKKVRLLIDEAILKCDAERIKLEAERFENLREIGNLLHPSVPISNDEDVDNKVERIWGDCTVRKKYSHVDLVVMVDGFEGEKGAVVAGSRGYFLKGVLVFLEQALIQYALRTLGSRGYIPIYTPFFMRKEVMQEVAQLSQFDEELYKVIGKGSEKSDDNSYDEKYLIATSEQPIAALHRDEWLRPEDLPIKYAGLSTCFRQEVGSHGRDTRGIFRVHQFEKIEQFVYSSPHDNKSWEMFEEMITTAEEFYQSLGIPYHIVNIVSGSLNHAASKKLDLEAWFPGSGAFRELVSCSNCTDYQARRLRIRYGQTKKMMDKVEFVHMLNATMCATTRTICAILENYQTEKGITVPEKLKEFMPPGLQELIPFVKPAPIEQEPSKKQKKQHEGSKKKAAARDVTLENRLQNMEVTDA

SEQ ID NO: 60 - protein, 166 aa, Homo sapiens
MAQTNSFFMLISSLMFLSLSQGQESQTELPNPRISCPEGTNAYRSYCYYFNEDPETWVDADLYCQNMNSGNLVSVLTQAEGAFVASLIKESSTDDSNVWIGLHDPKKNRRWHWSSGSLVSYKSWDTGSPSSANAGYCASLTSCSGFKKWKDESCEKKFSFVCKFKN

SEQ ID NO: 61 - protein, 617 aa, Homo sapiens
MDLKTAVFNAARDGKLRLLTKLLASKSKEEVSSLISEKTNGATPLLMAARYGHLDMVEFLLEQCSASIEVGGSVNFDGETIEGAPPLWAASAAGHLKVVQSLLNHGASVNNTTLTNSTPLRAACFDGHLEIVKYLVEHKADLEVSNRHGHTCLMISCYKGHKEIAQYLLEKGADVNRKSVKGNTALHDCAESGSLDIMKMLLMYCAKMEKDGYGMTPLLSASVTGHTNIVDFLTHHAQTSKTERINALELLGATFVDKKRDLLGALKYWKKAMNMRYSDRTNIISKPVPQTLIMAYDYAKEVNSAEELEGLIADPDEMRMQALLIRERILGPSHPDTSYYIRYRGAVYADSGNFKRCINLWKYALDMQQSNLDPLSPMTASSLLSFAELFSFMLQDRAKGLLGTTVTFDDLMGILCKSVLEIERAIKQTQCPADPLQLNKALSIILHLICLLEKVPCTLEQDHFKKQTIYRFLKLHPRGKNNFSPLHLAVDKNTTCVGRYPVCKFPSLQVTAILIECGADVNVRDSDDNSPLHIAALNNHPDIMNLLIKSGAHFDATNLHKQTASDLLDEKEIAKNLIQPINHTTLQCLAARVIVNHRIYYKGHIPEKLETFVSLHR

SEQ ID NO: 62 - protein, 367 aa, Homo sapiens
MASELCKTISVARLEKHKNLFLNYRNLHHFPLELLKDEGLQYLERLYMKRNSLTSLPENLAQKLPNLVELYLHSNNIVVVPEAIGSLVKLQCLDLSDNALEIVCPEIGRLRALRHLRLANNQLQFLPPEVGDLKELQTLDISTNRLLTLPERLHMCLSLQYLTVDRNRLWYVPRHLCQLPSLNELSMAGNRLAFLPLDLGRSRELQYVYVDNNIHLKGLPSYLYNKVIGCSGCGAPIQVSEVKLLSFSSGQRTVFLPAEVKAIGTEHDHVLPLQELAMRGLYHTYHSLLKDLNFLSPISLPRSLLELLHCPLGHCHRCSEPMFTIVYPKLFPLRETPMAGLHQWKTTVSFVAYCCSTQCLQTFDLLS

SEQ ID NO: 63 - protein, 1176 aa, Homo sapiens
MAERKGTAKVDFLKKIEKEIQQKWDTERVFEVNASNLEKQTSKGKYFVTFPYPYMNGRLHLGHTFSLSKCEFAVGYQRLKGKCCLFPFGLHCTGMPIKACADKLKREIELYGCPPDFPDEEEEEEETSVKTEDIIIKDKAKGKKSKAAAKAGSSKYQWGIMKSLGLSDEEIVKFSEAEHWLDYFPPLAIQDLKRMGLKVDWRRSFITTDVNPYYDSFVRWQFLTLRERNKIKFGKRYTIYSPKDGQPCMDHDRQTGEGVGPQEYTLLKLKALEPYPSKLSGLKGKNIFLVAATLRPETMFGQTNCWVRPDMKYIGFETVNGDIFICTQKAARNMSYQGFTKDNGVVPVVKELMGEEILGASLSAPLTSYKVIYVLPMLTIKEDKGTGVVTSVPSDSPDDIAALRDLKKKQALRAKYGIRDDMVLPFEPVPVIEIPGFGNLSAVTICDELKIQSQNDREKLAEAKEKIYLKGFYEGIMLVDGFKGQKVQDVKKTIQKKMIDAGDALIYMEPEKQVMSRSSDECVVALCDQWYLDYGEENWKKQTSQCLKNLETFCEETRRNFEATLGWLQEHACSRTYGLGTHLPWDEQWLIESLSDSTIYMAFYTVAHLLQGGNLHGQAESPLGIRPQQMTKEVWDYVFFKEAPFPKTQIAKEKLDQLKQEFEFWYPVDLRVSGKDLVPNHLSYYLYNHVAMWPEQSDKWPTAVRANGHLLLNSEKMSKSTGNFLTLTQAIDKFSADGMRLALADAGDTVEDANFVEAMADAGILRLYTWVEWVKEMVANWDSLRSGPASTFNDRVFASELNAGIIKTDQNYEKMMFKEALKTGFFEFQAAKDKYRELAVEGMHRELVFRFIEVQTLLLAPFCPHLCEHIWTLLGKPDSIMNASWPVAGPVDEVLIHSSQYLMEVTHDLRLRLKNYMMPAKGKKTDKQPLQKPSHCTIYVAKNYPPWQHTTLSVLRKHFEANNGKLPDNKVIASELGSMPELKKYMKKVMPFVAMIKENLEKMGPRILDLQLEFDEKAVLMENIVYLTNSLELEHIEVKFASEAEDKIREDCCPGKPLNVFRIEPGVSVSLVNPQPSNGHFSTKIEIKQGDNCDSIIRRLMKMNRGIKDLSKVKLMRFDDPLLGPRRVPVLGKEYTEKTPISEHAVFNVDLMSKKIHLTENGIRVDIGDTIIYLVH

SEQ ID NO: 64 - protein, 724 aa, Homo sapiens
MPEEVHHGEEEVETFAFQAEIAQLMSLIINTFYSNKEIFLRELISNASDALDKIRYESLTDPSKLDSGKELKIDIIPNPQERTLTLVDTGIGMTKADLINNLGTIAKSGTKAFMEALQAGADISMIGQFGVGFYSAYLVAEKVVVITKHNDDEQYAWESSAGGSFTVRADHGEPIGRGTKVILHLKEDQTEYLEERRVKEVVKKHSQFIGYPITLYLEKEREKEISDDEAEEEKGEKEEEDKDDEEKPKIEDVGSDEEDDSGKDKKKKTKKIKEKYIDQEELNKTKPIWTRNPDDITQEEYGEFYKSLTNDWEDHLAVKHFSVEGQLEFRALLFIPRRAPFDLFENKKKKNNIKLYVRRVFIMDSCDELIPEYLNFIRGVVDSEDLPLNISREMLQQSKILKVIRKNIVKKCLELFSELAEDKENYKKFYEAFSKNLKLGIHEDSTNRRRLSELLRYHTSQSGDEMTSLSEYVSRMKETQKSIYYITGESKEQVANSAFVERVRKRGFEVVYMTEPIDEYCVQQLKEFDGKSLVSVTKEGLELPEDEEEKKKMEESKAKFENLCKLMKEILDKKVEKVTISNRLVSSPCCIVTSTYGWTANMERIMKAQALRDNSTMGYMMAKKHLEINPDHPIVETLRQKAEADKNDKAVKDLVVLLFETALLSSGFSLEDPQTHSNRIYRMIKLGLGIDEDEVAAEEPNAAVPDEIPPLEGDEDASRMEEVD

SEQ ID NO: 65 - protein, 237 aa, Homo sapiens
MNIFDRKINFDALLKFSHITPSTQQHLKKVYASFALCMFVAAAGAYVHMVTHFIQAGLLSALGSLILMIWLMATPHSHETEQKRLGLLAGFAFLTGVGLGPALEFCIAVNPSILPTAFMGTAMIFTCFTLSALYARRRSYLFLGGILMSALSLLLLSSLGNVFFGSIWPFQANLYVGLVVMCGFVLVDTQLIIEKAEHGDQDYIWHCIDLFLDFITVFRKLMMILAMNEKDKKKEKK

SEQ ID NO: 66 - protein, 205 aa, Homo sapiens
MALQLSREQGITLRGSAEIVAEFFSFGINSILYQRGIYPSETFTRVQKYGLTLLVTTDLELIKYLNNVVEQLKDWLYKCSVQKLVVVISNIESGEVLERWQFDIECDKTAKDDSAPREKSQKAIQDEIRSVIRQITATVTFLPLLEVSCSFDLLIYTDKDLVVPEKWEESGPQFITNSEEVRLRSFTTTIHKVNSMVAYKIPVND

SEQ ID NO: 67 - protein, 471 aa, Homo sapiens
MPNSEPASLLELFNSIATQGELVRSLKAGNASKDEIDSAVKMLVSLKMSYKAAAGEDYKADCPPGNPAPTSNHGPDATEAEEDFVDPWTVQTSSAKGIDYDKLIVRFGSSKIDKELINRIERATGQRPHHFLRRGIFFSHRDMNQVLDAYENKKPFYLYTGRGPSSEAMHVGHLIPFIFTKWLQDVFNVPLVIQMTDDEKYLWKDLTLDQAYGDAVENAKDIIACGFDINKTFIFSDLDYMGMSSGFYKNVVKIQKHVTFNQVKGIFGFTDSDCIGKISFPAIQAAPSFSNSFPQIFRDRTDIQCLIPCAIDQDPYFRMTRDVAPRIGYPKPALLHSTFFPALQGAQTKMSASDPNSSIFLTDTAKQIKTKVNKHAFSGGRDTIEEHRQFGGNCDVDVSFMYLTFFLEDDDKLEQIRKDYTSGAMLTGELKKALIEVLQPLIAEHQARRKEVTDEIVKEFMTPRKLSFDFQ

SEQ ID NO: 68 - protein, 294 aa, Homo sapiens
MEDSMDMDMSPLRPQNYLFGCELKADKDYHFKVDNDENEHQLSLRTVSLGAGAKDELHIVEAEAMNYEGSPIKVTLATLKMSVQPTVSLGGFEITPPVVLRLKCGSGPVHISGQHLVAVEEDAESEDEEEEDVKLLSISGKRSAPGGGSKVPQKKVKLAADEDDDDDDEEDDDEDDDDDDFDDEEAEEKAPVKKSIRDTPAKNAQKSNQNGKDSKPSSTPRSKGQESFKKQEKTPKTPKGPSSVEDIKAKMQASIEKGGSLPKVEAKFINYVKNCFRMTDQEAIQDLWQWRKSL

SEQ ID NO: 69 - DNA, 2974 bp, Homo sapiens
ctcagggcagagggaggaaggacagcagaccagacagtcacagcagccttgacaaaacgttcctggaactcaagctcttctccacagaggaggacagagcagacagcagagaccatggagtctccctcggcccctccccacagatggtgcatcccctggcagaggctcctgctcacagcctcacttctaaccttctggaacccgcccaccactgccaagctcactattgaatccacgccgttcaatgtcgcagaggggaaggaggtgcttctacttgtccacaatctgccccagcatctttttggctacagctggtacaaaggtgaaagagtggatggcaaccgtcaaattataggatatgtaataggaactcaacaagctaccccagggcccgcatacagtggtcgagagataatataccccaatgcatccctgctgatccagaacatcatccagaatgacacaggattctacaccctacacgtcataaagtcagatcttgtgaatgaagaagcaactggccagttccgggtatacccggagctgcccaagccctccatctccagcaacaactccaaacccgtggaggacaaggatgctgtggccttcacctgtgaacctgagactcaggacgcaacctacctgtggtgggtaaacaatcagagcctcccggtcagtcccaggctgcagctgtccaatggcaacaggaccctcactctattcaatgtcacaagaaatgacacagcaagctacaaatgtgaaacccagaacccagtgagtgccaggcgcagtgattcagtcatcctgaatgtcctctatggcccggatgcccccaccatttcccctctaaacacatcttacagatcaggggaaaatctgaacctctcctgccacgcagcctctaacccacctgcacagtactcttggtttgtcaatgggactttccagcaatccacccaagagctctttatccccaacatcactgtgaataatagtggatcctatacgtgccaagcccataactcagacactggcctcaataggaccacagtcacgacgatcacagtctatgcagagccacccaaacccttcatcaccagcaacaactccaaccccgtggaggatgaggatgctgtagccttaacctgtgaacctgagattcagaacacaacctacctgtggtgggtaaataatcagagcctcccggtcagtcccaggctgcagctgtccaatgacaacaggaccctcactctactcagtgtcacaaggaatgatgtaggaccctatgagtgtggaatccagaacgaattaagtgttgaccacagcgacccagtcatcctgaatgtcctctatggcccagacgaccccaccatttccccctcatacacctattaccgtccaggggtgaacctcagcctctcctgccatgcagcctctaacccacctgcacagtattcttggctgattgatgggaacatccagcaacacacacaagagctctttatctccaacatcactgagaagaacagcggactctatacctgccaggccaataactcagccagtggccacagcaggactacagtcaagacaatcacagtctctgcggagctgcccaagccctccatctccagcaacaactccaaacccgtggaggacaaggatgctgtggccttcacctgtgaacctgaggctcagaacacaacctacctgtggtgggtaaatggtcagagcctcccagtcagtcccaggctgcagctgtccaatggcaacaggaccctcactctattcaatgtcacaagaaatgacgcaagagcctatgtatgtggaatccagaactcagtgagtgcaaaccgcagtgacccagtcaccctggatgtcctctatgggccggacacccccatcatttcccccccagactcgtcttacctttcgggagcgaacctcaacctctcctgccactcggcctctaacccatccccgcagtattcttggcgtatcaatgggataccgcagcaacacacacaagttctctttatcgccaaaatcacgccaaataataacgggacctatgcctgttttgtctctaacttggctactggccgcaataattccatagtcaagagcatcacagtctctgcatctggaacttctcctggtctctcagctggggccactgtcggcatcatgattggagtgctggttggggttgctctgatatagcagccctggtgtagtttcttcatttcaggaagactgacagttgttttgcttcttccttaaagcatttgcaacagctacagtctaaaattgcttctttaccaaggatatttacagaaaagactctgaccagagatcgagaccatcctagccaacatcgtgaaaccccatctctactaaaaatacaaaaatgagctgggcttggtggcgcgcacctgtagtcccagttactcgggaggctgaggcaggagaatcgcttgaacccgggaggtggagattgcagtgagcccagatcgcaccactgcactccagtctggcaacagagcaagactccatctcaaaaagaaaagaaaagaagactctgacctgtactcttgaatacaagtttctgataccactgcactgtctgagaatttccaaaactttaatgaactaactgacagcttcatgaaactgtccaccaagatcaagcagagaaaataattaatttcatgggactaaatgaactaatgaggattgctgattctttaaatgtcttgtttcccagatttcaggaaactttttttcttttaagctatccactcttacagcaatttgataaaatatacttttgtgaacaaaaattgagacatttacattttctccctatgtggtcgctccagacttgggaaactattcatgaatatttatattgtatggtaatatagttattgcacaagttcaataaaaatctgctctttgtataacagaaaaa

SEQ ID NO: 70 - DNA, 2032 bp, Homo sapiens
tccatattgtgcttccaccactgccaataacaaaataactagcaaccatgaagtgggtggaatcaatttttttaattttcctactaaattttactgaatccagaacactgcatagaaatgaatatggaatagcttccatattggattcttaccaatgtactgcagagataagtttagctgacctggctaccatattttttgcccagtttgttcaagaagccacttacaaggaagtaagcaaaatggtgaaagatgcattgactgcaattgagaaacccactggagatgaacagtcttcagggtgtttagaaaaccagctacctgcctttctggaagaactttgccatgagaaagaaattttggagaagtacggacattcagactgctgcagccaaagtgaagagggaagacataactgttttcttgcacacaaaaagcccactccagcatcgatcccacttttccaagttccagaacctgtcacaagctgtgaagcatatgaagaagacagggagacattcatgaacaaattcatttatgagatagcaagaaggcatcccttcctgtatgcacctacaattcttctttgggctgctcgctatgacaaaataattccatcttgctgcaaagctgaaaatgcagttgaatgcttccaaacaaaggcagcaacagttacaaaagaattaagagaaagcagcttgttaaatcaacatgcatgtgcagtaatgaaaaattttgggacccgaactttccaagccataactgttactaaactgagtcagaagtttaccaaagttaattttactgaaatccagaaactagtcctggatgtggcccatgtacatgagcactgttgcagaggagatgtgctggattgtctgcaggatggggaaaaaatcatgtcctacatatgttctcaacaagacactctgtcaaacaaaataacagaatgctgcaaactgaccacgctggaacgtggtcaatgtataattcatgcagaaaatgatgaaaaacctgaaggtctatctccaaatctaaacaggtttttaggagatagagattttaaccaattttcttcaggggaaaaaaatatcttcttggcaagttttgttcatgaatattcaagaagacatcctcagcttgctgtctcagtaattctaagagttgctaaaggataccaggagttattggagaagtgtttccagactgaaaaccctcttgaatgccaagataaaggagaagaagaattacagaaatacatccaggagagccaagcattggcaaagcgaagctgcggcctcttccagaaactaggagaatattacttacaaaatgcgtttctcgttgcttacacaaagaaagccccccagctgacctcgtcggagctgatggccatcaccagaaaaatggcagccacagcagccacttgttgccaactcagtgaggacaaactattggcctgtggcgagggagcggctgacattattatcggacacttatgtatcagacatgaaatgactccagtaaaccctggtgttggccagtgctgcacttcttcatatgccaacaggaggccatgcttcagcagcttggtggtggatgaaacatatgtccctcctgcattctctgatgacaagttcattttccataaggatctgtgccaagctcagggtgtagcgctgcaaacgatgaagcaagagtttctcattaaccttgtgaagcaaaagccacaaataacagaggaacaacttgaggctgtcattgcagatttctcaggcctgttggagaaatgctgccaaggccaggaacaggaagtctgctttgctgaagagggacaaaaactgatttcaaaaactcgtgctgctttgggagtttaaattacttcaggggaagagaagacaaaacgagtctttcattcggtgtgaacttttctctttaattttaactgatttaacactttttgtgaattaatgaaatgataaagacttttatgtgagatttccttatcacagaaataaaatatctccaaatg

SEQ ID NO: 71 - DNA, 1639 bp, Homo sapiens
agcagagcacacaagcttctaggacaagagccaggaagaaaccaccggaaggaaccatctcactgtgtgtaaacatgacttccaagctggccgtggctctcttggcagccttcctgatttctgcagctctgtgtgaaggtgcagttttgccaaggagtgctaaagaacttagatgtcagtgcataaagacatactccaaacctttccaccccaaatttatcaaagaactgagagtgattgagagtggaccacactgcgccaacacagaaattattgtaaagctttctgatggaagagagctctgtctggaccccaaggaaaactgggtgcagagggttgtggagaagtttttgaagagggctgagaattcataaaaaaattcattctctgtggtatccaagaatcagtgaagatgccagtgaaacttcaagcaaatctacttcaacacttcatgtattgtgtgggtctgttgtagggttgccagatgcaatacaagattcctggttaaatttgaatttcagtaaacaatgaatagtttttcattgtaccatgaaatatccagaacatacttatatgtaaagtattatttatttgaatctacaaaaaacaacaaataatttttaaatataaggattttcctagatattgcacgggagaatatacaaatagcaaaattgagccaagggccaagagaatatccgaactttaatttcaggaattgaatgggtttgctagaatgtgatatttgaagcatcacataaaaatgatgggacaataaattttgccataaagtcaaatttagctggaaatcctggatttttttctgttaaatctggcaaccctagtctgctagccaggatccacaagtccttgttccactgtgccttggtttctcctttatttctaagtggaaaaagtattagccaccatcttacctcacagtgatgttgtgaggacatgtggaagcactttaagttttttcatcataacataaattattttcaagtgtaacttattaacctatttattatttatgtatttatttaagcatcaaatatttgtgcaagaatttggaaaaatagaagatgaatcattgattgaatagttataaagatgttatagtaaatttattttattttagatattaaatgatgttttattagataaatttcaatcagggtttttagattaaacaaagaaacaattgggtacccagttaaattttcatttcagataaacaacaaataattttttagtataagtacattattgtttatctgaaagttttaattgaactaacaatcctagtttgatactcccagtcttgtcattgccagctgtgttggtagtgctgtgttgaattacggaataatgagttagaactattaaaacagccaaaactccacagtcaatattagtaatttcttgctggttgaaacttgtttattatgtacaaatagattcttataatattatttaaatgactgcatttttaaatacaaggctttatatttttaactttaagatgtttttatgtgctctccaaattttttttactgtttctgattgtatggaaatataaaagtaaatatgaaacatttaaaatataatttgttgtcaaagtaaaaaaaaaaaaaaa

SEQ ID NO: 72 - DNA, 1524 bp, Homo sapiens
gcagagcacagcatcgtcgggaccagactcgtctcaggccagttgcagccttctcagccaaacgccgaccaaggaaaactcactaccatgagaattgcagtgatttgcttttgcctcctaggcatcacctgtgccataccagttaaacaggctgattctggaagttctgaggaaaagcagctttacaacaaatacccagatgctgtggccacatggctaaaccctgacccatctcagaagcagaatctcctagccccacagacccttccaagtaagtccaacgaaagccatgaccacatggatgatatggatgatgaagatgatgatgaccatgtggacagccaggactccattgactcgaacgactctgatgatgtagatgacactgatgattctcaccagtctgatgagtctcaccattctgatgaatctgatgaactggtcactgattttcccacggacctgccagcaaccgaagttttcactccagttgtccccacagtagacacatatgatggccgaggtgatagtgtggtttatggactgaggtcaaaatctaagaagtttcgcagacctgacatccagtaccctgatgctacagacgaggacatcacctcacacatggaaagcgaggagttgaatggtgcatacaaggccatccccgttgcccaggacctgaacgcgccttctgattgggacagccgtgggaaggacagttatgaaacgagtcagctggatgaccagagtgctgaaacccacagccacaagcagtccagattatataagcggaaagccaatgatgagagcaatgagcattccgatgtgattgatagtcaggaactttccaaagtcagccgtgaattccacagccatgaatttcacagccatgaagatatgctggttgtagaccccaaaagtaaggaagaagataaacacctgaaatttcgtatttctcatgaattagatagtgcatcttctgaggtcaattaaaaggagaaaaaatacaatttctcactttgcatttagtcaaaagaaaaaatgctttatagcaaaatgaaagagaacatgaaatgcttctttctcagtttattggttgaatgtgtatctatttgagtctggaaataactaatgtgtttgataattagtttagtttgtggcttcatggaaactccctgtaaactaaaagcttcagggttatgtctatgttcattctatagaagaaatgcaaactatcactgtattttaatatttgttattctctcatgaatagaaatttatgtagaagcaaacaaaatacttttacccacttaaaaagagaatataacattttatgtcactataatcttttgttttttaagttagtgtatattttgttgtgattatctttttgtggtgtgaataaatcttttatcttgaatgtaataagaatttggtggtgtcaattgcttatttgttttcccacggttgtccagcaattaataaaacataaccttttttactgcctaaaaaaaaaaaaaaaaaaaa

SEQ ID NO: 73 - DNA, 5500 bp, Homo sapiens
gcagaccgtcgctaatgaatcttggggccggtgtcgggccggggcggcttgatcggcaactaggaaaccccaggcgcagaggccaggagcgagggcagcgaggatcagaggccaggccttcccggctgccggcgctcctcggaggtcagggcagatgaggaacatgactctcccccttcggaggaggaaggaagtcccgctgccaccttatctctgctcctctgcctcctccctgttcccagagctttttctctagagaagattttgaaggcggcttttgtgctgacggccacccaccatcatctaaagaagataaacttggcaaatgacatgcaggttcttcaaggcagaataattgcagaaaatcttcaaaggaccctatctgcagatgttctgaatacctctgagaatagagattgattattcaaccaggatacctaattcaagaactccagaaatcaggagacggagacattttgtcagttttgcaacattggaccaaatacaatgaagtattcttgctgtgctctggttttggctgtcctgggcacagaattgctgggaagcctctgttcgactgtcagatccccgaggttcagaggacggatacagcaggaacgaaaaaacatccgacccaacattattcttgtgcttaccgatgatcaagatgtggagctggggtccctgcaagtcatgaacaaaacgagaaagattatggaacatgggggggccaccttcatcaatgcctttgtgactacacccatgtgctgcccgtcacggtcctccatgctcaccgggaagtatgtgcacaatcacaatgtctacaccaacaacgagaactgctcttccccctcgtggcaggccatgcatgagcctcggacttttgctgtatatcttaacaacactggctacagaacagccttttttggaaaatacctcaatgaatataatggcagctacatcccccctgggtggcgagaatggcttggattaatcaagaattctcgcttctataattacactgtttgtcgcaatggcatcaaagaaaagcatggatttgattatgcaaaggactacttcacagacttaatcactaacgagagcattaattacttcaaaatgtctaagagaatgtatccccataggcccgttatgatggtgatcagccacgctgcgccccacggccccgaggactcagccccacagttttctaaactgtaccccaatgcttcccaacacataactcctagttataactatgcaccaaatatggataaacactggattatgcagtacacaggaccaatgctgcccatccacatggaatttacaaacattctacagcgcaaaaggctccagactttgatgtcagtggatgattctgtggagaggctgtataacatgctcgtggagacgggggagctggagaatacttacatcatttacaccgccgaccatggttaccatattgggcagtttggactggtcaaggggaaatccatgccatatgactttgatattcgtgtgcctttttttattcgtggtccaagtgtagaaccaggatcaatagtcccacagatcgttctcaacattgacttggcccccacgatcctggatattgctgggctcgacacacctcctgatgtggacggcaagtctgtcctcaaacttctggacccagaaaagccaggtaacaggtttcgaacaaacaagaaggccaaaatttggcgtgatacattcctagtggaaagaggcaaatttctacgtaagaaggaagaatccagcaagaatatccaacagtcaaatcacttgcccaaatatgaacgggtcaaagaactatgccagcaggccaggtaccagacagcctgtgaacaaccggggcagaagtggcaatgcattgaggatacatctggcaagcttcgaattcacaagtgtaaaggacccagtgacctgctcacagtccggcagagcacgcggaacctctacgctcgcggcttccatgacaaagacaaagagtgcagttgtagggagtctggttaccgtgccagcagaagccaaagaaagagtcaacggcaattcttgagaaaccaggggactccaaagtacaagcccagatttgtccatactcggcagacacgttccttgtccgtcgaatttgaaggtgaaatatatgacataaatctggaagaagaagaagaattgcaagtgttgcaaccaagaaacattgctaagcgtcatgatgaaggccacaaggggccaagagatctccaggcttccagtggtggcaacaggggcaggatgctggcagatagcagcaacgccgtgggcccacctaccactgtccgagtgacacacaagtgttttattcttcccaatgactctatccattgtgagagagaactgtaccaatcggccagagcgtggaaggaccataaggcatacattgacaaagagattgaagctctgcaagataaaattaagaatttaagagaagtgagaggacatctgaagagaaggaagcctgaggaatgtagctgcagtaaacaaagctattacaataaagagaaaggtgtaaaaaagcaagagaaattaaagagccatcttcacccattcaaggaggctgctcaggaagtagatagcaaactgcaacttttcaaggagaacaaccgtaggaggaagaaggagaggaaggagaagagacggcagaggaagggggaagagtgcagcctgcctggcctcacttgcttcacgcatgacaacaaccactggcagacagccccgttctggaacctgggatctttctgtgcttgcacgagttctaacaataacacctactggtgtttgcgtacagttaatgagacgcataattttcttttctgtgagtttgctactggctttttggagtattttgatatgaatacagatccttatcagctcacaaatacagtgcacacggtagaacgaggcattttgaatcagctacacgtacaactaatggagctcagaagctgtcaaggatataagcagtgcaacccaagacctaagaatcttgatgttggaaataaagatggaggaagctatgacctacacagaggacagttatgggatggatgggaaggttaatcagccccgtctcactgcagacatcaactggcaaggcctagaggagctacacagtgtgaatgaaaacatctatgagtacagacaaaactacagacttagtctggtggactggactaattacttgaaggatttagatagagtatttgcactgctgaagagtcactatgagcaaaataaaacaaataagactcaaactgctcaaagtgacgggttcttggttgtctctgctgagcacgctgtgtcaatggagatggcctctgctgactcagatgaagacccaaggcataaggttgggaaaacacctcatttgaccttgccagctgaccttcaaaccctgcatttgaaccgaccaacattaagtccagagagtaaacttgaatggaataacgacattccagaagttaatcatttgaattctgaacactggagaaaaaccgaaaaatggacggggcatgaagagactaatcatctggaaaccgatttcagtggcgatggcatgacagagctagagctcgggcccagccccaggctgcagcccattcgcaggcacccgaaagaacttccccagtatggtggtcctggaaaggacatttttgaagatcaactatatcttcctgtgcattccgatggaatttcagttcatcagatgttcaccatggccaccgcagaacaccgaagtaattccagcatagcggggaagatgttgaccaaggtggagaagaatcacgaaaaggagaagtcacagcacctagaaggcagcgcctcctcttcactctcctctgattagatgaaactgttaccttaccctaaacacagtatttctttttaacttttttatttgtaaactaataaaggtaatcacagccaccaacattccaagctaccctgggtacctttgtgcagtagaagctagtgagcatgtgagcaagcggtgtgcacacggagactcatcgttataatttactatctgccaagagtagaaagaaaggctggggatatttgggttggcttggttttgattttttgcttgtttgtttgttttgtactaaaacagtattatcttttgaatatcgtagggacataagtatatacatgttatccaatcaagatggctagaatggtgcctttctgagtgtctaaaacttgacacccctggtaaatctttcaacacacttccactgcctgcgtaatgaagttttgattcatttttaaccactggaatttttcaatgccgtcattttcagttagatgattttgcactttgagattaaaatgccatgtctatttgattagtcttatttttttatttttacaggcttatcagtctcactgttggctgtcattgtgacaaagtcaaataaacccccaaggacgacacacagtatggatcacatattgtttgacattaagcttttgccagaaaatgttgcatgtgttttacctcgacttgctaaaatcgattagcagaaaggcatggctaataatgttggtggtgaaaataaataaataagtaaacaaaatgaagattgcctgctctctctgtgcctagcctcaaagcgttcatcatacatcatacctttaagattgctatattttgggttattttcttgacaggagaaaaagatctaaagatcttttattttcatcttttttggttttcttggcatgactaagaagcttaaatgttgataaaatatgactagttttgaatttacaccaagaacttctcaataaaagaaaatcatgaatgctccacaatttcaacataccacaagagaagttaatttcttaacattgtgttctatgattatttgtaagaccttcaccaagttctgatatcttttaaagacatagttcaaaattgcttttgaaaatctgtattcttgaaaatatccttgttgtgtattaggtttttaaataccagctaaaggattacctcactgagtcatcagtaccctcctattcagctccccaagatgatgtgtttttgcttaccctaagagaggttttcttcttatttttagataattcaagtgcttagataaattatgttttctttaagtgtttatggtaaactcttttaaagaaaatttaatatgttatagctgaatctttttggtaactttaaatctttatcatagactctgtacatatgttcaaattagctgcttgcctgatgtgtgtatcatcggtgggatgacagaacaaacatatttatgatcatgaataatgtgctttgtaaaaagatttcaagttattaggaagcatactctgttttttaatcatgtataatattccatgatacttttatagaacaattctggcttcaggaaagtctagaagcaatatttcttcaaataaaaggtgtttaaacttt

SEQ ID NO: 74 - DNA, 1778 bp, Homo sapiens
tagaagtttacaatgaagtttcttctaatactgctcctgcaggccactgcttctggagctcttcccctgaacagctctacaagcctggaaaaaaataatgtgctatttggtgagagatacttagaaaaattttatggccttgagataaacaaacttccagtgacaaaaatgaaatatagtggaaacttaatgaaggaaaaaatccaagaaatgcagcacttcttgggtctgaaagtgaccgggcaactggacacatctaccctggagatgatgcacgcacctcgatgtggagtccccgatctccatcatttcagggaaatgccaggggggcccgtatggaggaaacattatatcacctacagaatcaataattacacacctgacatgaaccgtgaggatgttgactacgcaatccggaaagctttccaagtatggagtaatgttacccccttgaaattcagcaagattaacacaggcatggctgacattttggtggtttttgcccgtggagctcatggagacttccatgcttttgatggcaaaggtggaatcctagcccatgcttttggacctggatctggcattggaggggatgcacatttcgatgaggacgaattctggactacacattcaggaggcacaaacttgttcctcactgctgttcacgagattggccattccttaggtcttggccattctagtgatccaaaggctgtaatgttccccacctacaaatatgtcgacatcaacacatttcgcctctctgctgatgacatacgtggcattcagtccctgtatggagacccaaaagagaaccaacgcttgccaaatcctgacaattcagaaccagctctctgtgaccccaatttgagttttgatgctgtcactaccgtgggaaataagatctttttcttcaaagacaggttcttctggctgaaggtttctgagagaccaaagaccagtgttaatttaatttcttccttatggccaaccttgccatctggcattgaagctgcttatgaaattgaagccagaaatcaagtttttctttttaaagatgacaaatactggttaattagcaatttaagaccagagccaaattatcccaagagcatacattcttttggttttcctaactttgtgaaaaaaattgatgcagctgtttttaacccacgtttttataggacctacttctttgtagataaccagtattggaggtatgatgaaaggagacagatgatggaccctggttatcccaaactgattaccaagaacttccaaggaatcgggcctaaaattgatgcagtcttctattctaaaaacaaatactactatttcttccaaggatctaaccaatttgaatatgacttcctactccaacgtatcaccaaaacactgaaaagcaatagctggtttggttgttagaaatggtgtaattaatggtttttgttagttcacttcagcttaataagtatttattgcatatttgctatgtcctcagtgtaccactacttagagatatgtatcataaaaataaaatctgtaaaccataggtaatgattatataaaatacataatatttttcaattttgaaaactctaattgtccattcttgcttgactctactattaagtttgaaaatagttaccttcaaagcaagataattctatttgaagcatgctctgtaagttgcttcctaacatccttggactgagaaattatacttacttctggcataactaaaattaagtatatatattttggctcaaataaaattg

SEQ ID NO: 75 - DNA, 777 bp, Homo sapiens
ggccccttgtctgcagagatggctcccaatgcttcctgcctctgtgtgcatgtccgttccgaggaatgggatttaatgacctttgatgccaacccatatgacagcgtgaaaaaaatcaaagaacatgtccggtctaagaccaaggttcctgtgcaggaccaggttcttttgctgggctccaagatcttaaagccacggagaagcctctcatcttatggcattgacaaagagaagaccatccaccttaccctgaaagtggtgaagcccagtgatgaggagctgcccttgtttcttgtggagtcaggtgatgaggcaaagaggcacctcctccaggtgcgaaggtccagctcagtggcacaagtgaaagcaatgatcgagactaagacgggtataatccctgagacccagattgtgacttgcaatggaaagagactggaagatgggaagatgatggcagattacggcatcagaaagggcaacttactcttcctggcatcttattgtattggagggtgaccaccctggggatggggtgttggcaggggtcaaaaagcttatttcttttaatctcttactcaacgaacacatcttctgatgatttcccaaaattaatgagaatgagatgagtagagtaagatttgggtgggatgggtaggatgaagtatattgcccaactctatgtttctttgattctaacacaattaattaagtgacatgatttttactaatgtattactgagactagtaaataaatttttaaggcaaaatagagcattc

SEQ ID NO: 76 - DNA, 5921 bp, Homo sapiens
agcagacgggagtttctcctcggggtcggagcaggaggcacgcggagtgtgaggccacgcatgagcggacgctaaccccctccccagccacaaagagtctacatgtctagggtctagacatgttcagctttgtggacctccggctcctgctcctcttagcggccaccgccctcctgacgcacggccaagaggaaggccaagtcgagggccaagacgaagacatcccaccaatcacctgcgtacagaacggcctcaggtaccatgaccgagacgtgtggaaacccgagccctgccggatctgcgtctgcgacaacggcaaggtgttgtgcgatgacgtgatctgtgacgagaccaagaactgccccggcgccgaagtccccgagggcgagtgctgtcccgtctgccccgacggctcagagtcacccaccgaccaagaaaccaccggcgtcgagggacccaagggagacactggcccccgaggcccaaggggacccgcaggcccccctggccgagatggcatccctggacagcctggacttcccggaccccccggaccccccggacctcccggaccccctggcctcggaggaaactttgctccccagctgtcttatggctatgatgagaaatcaaccggaggaatttccgtgcctggccccatgggtccctctggtcctcgtggtctccctggcccccctggtgcacctggtccccaaggcttccaaggtccccctggtgagcctggcgagcctggagcttcaggtcccatgggtccccgaggtcccccaggtccccctggaaagaatggagatgatggggaagctggaaaacctggtcgtcctggtgagcgtgggcctcctgggcctcagggtgctcgaggattgcccggaacagctggcctccctggaatgaagggacacagaggtttcagtggtttggatggtgccaagggagatgctggtcctgctggtcctaagggtgagcctggcagccctggtgaaaatggagctcctggtcagatgggcccccgtggcctgcctggtgagagaggtcgccctggagcccctggccctgctggtgctcgtggaaatgatggtgctactggtgctgccgggccccctggtcccaccggccccgctggtcctcctggcttccctggtgctgttggtgctaagggtgaagctggtccccaagggccccgaggctctgaaggtccccagggtgtgcgtggtgagcctggcccccctggccctgctggtgctgctggccctgctggaaaccctggtgctgatggacagcctggtgctaaaggtgccaatggtgctcctggtattgctggtgctcctggcttccctggtgcccgaggcccctctggaccccagggccccggcggccctcctggtcccaagggtaacagcggtgaacctggtgctcctggcagcaaaggagacactggtgctaagggagagcctggccctgttggtgttcaaggaccccctggccctgctggagaggaaggaaagcgaggagctcgaggtgaacccggacccactggcctgcccggaccccctggcgagcgtggtggacctggtagccgtggtttccctggcgcagatggtgttgctggtcccaagggtcccgctggtgaacgtggttctcctggccccgctggccccaaaggatctcctggtgaagctggtcgtcccggtgaagctggtctgcctggtgccaagggtctgactggaagccctggcagccctggtcctgatggcaaaactggcccccctggtcccgccggtcaagatggtcgccccggacccccaggcccacctggtgcccgtggtcaggctggtgtgatgggattccctggacctaaaggtgctgctggagagcccggcaaggctggagagcgaggtgttcccggaccccctggcgctgtcggtcctgctggcaaagatggagaggctggagctcagggaccccctggccctgctggtcccgctggcgagagaggtgaacaaggccctgctggctcccccggattccagggtctccctggtcctgctggtcctccaggtgaagcaggcaaacctggtgaacagggtgttcctggagaccttggcgcccctggcccctctggagcaagaggcgagagaggtttccctggcgagcgtggtgtgcaaggtccccctggtcctgctggaccccgaggggccaacggtgctcccggcaacgatggtgctaagggtgatgctggtgcccctggagctcccggtagccagggcgcccctggccttcagggaatgcctggtgaacgtggtgcagctggtcttccagggcctaagggtgacagaggtgatgctggtcccaaaggtgctgatggctctcctggcaaagatggcgtccgtggtctgaccggccccattggtcctcctggccctgctggtgcccctggtgacaagggtgaaagtggtcccagcggccctgctggtcccactggagctcgtggtgcccccggagaccgtggtgagcctggtccccccggccctgctggctttgctggcccccctggtgctgacggccaacctggtgctaaaggcgaacctggtgatgctggtgccaaaggcgatgctggtccccctgggcctgccggacccgctggaccccctggccccattggtaatgttggtgctcctggagccaaaggtgctcgcggcagcgctggtccccctggtgctactggtttccctggtgctgctggccgagtcggtcctcctggcccctctggaaatgctggaccccctggccctcctggtcctgctggcaaagaaggcggcaaaggtccccgtggtgagactggccctgctggacgtcctggtgaagttggtccccctggtccccctggccctgctggcgagaaaggatcccctggtgctgatggtcctgctggtgctcctggtactcccgggcctcaaggtattgctggacagcgtggtgtggtcggcctgcctggtcagagaggagagagaggcttccctggtcttcctggcccctctggtgaacctggcaaacaaggtccctctggagcaagtggtgaacgtggtccccccggtcccatgggcccccctggattggctggaccccctggtgaatctggacgtgagggggctcctgctgccgaaggttcccctggacgagacggttctcctggcgccaagggtgaccgtggtgagaccggccccgctggaccccctggtgctcctggtgctcctggtgcccctggccccgttggccctgctggcaagagtggtgatcgtggtgagactggtcctgctggtcccgccggtcccgtcggccccgtcggcgcccgtggccccgccggaccccaaggcccccgtggtgacaagggtgagacaggcgaacagggcgacagaggcataaagggtcaccgtggcttctctggcctccagggtccccctggccctcctggctctcctggtgaacaaggtccctctggagcctctggtcctgctggtccccgaggtccccctggctctgctggtgctcctggcaaagatggactcaacggtctccctggccccattgggccccctggtcctcgcggtcgcactggtgatgctggtcctgttggtccccccggccctcctggacctcctggtccccctggtcctcccagcgctggtttcgacttcagcttcctgccccagccacctcaagagaaggctcacgatggtggccgctactaccgggctgatgatgccaatgtggttcgtgaccgtgacctcgaggtggacaccaccctcaagagcctgagccagcagatcgagaacatccggagcccagagggaagccgcaagaaccccgcccgcacctgccgtgacctcaagatgtgccactctgactggaagagtggagagtactggattgaccccaaccaaggctgcaacctggatgccatcaaagtcttctgcaacatggagactggtgagacctgcgtgtaccccactcagcccagtgtggcccagaagaactggtacatcagcaagaaccccaaggacaagaggcatgtctggttcggcgagagcatgaccgatggattccagttcgagtatggcggccagggctccgaccctgccgatgtggccatccagctgaccttcctgcgcctgatgtccaccgaggcctcccagaacatcacctaccactgcaagaacagcgtggcctacatggaccagcagactggcaacctcaagaaggccctgctcctcaagggctccaacgagatcgagatccgcgccgagggcaacagccgcttcacctacagcgtcactgtcgatggctgcacgagtcacaccggagcctggggcaagacagtgattgaatacaaaaccaccaagtcctcccgcctgcccatcatcgatgtggcccccttggacgttggtgccccagaccaggaattcggcttcgacgttggccctgtctgcttcctgtaaactccctccatcccaacctggctccctcccacccaaccaactttccccccaacccggaaacagacaagcaacccaaactgaacccccccaaaagccaaaaaatgggagacaatttcacatggactttggaaaatatttttttcctttgcattcatctctcaaacttagtttttatctttgaccaaccgaacatgaccaaaaaccaaaagtgcattcaaccttaccaaaaaaaaaaaaaaaaaaaaaagaataaataaataagtttttaaaaaaggaagcttggtccacttgcttgaagacccatgcgggggtaagtccctttctgcccgttgggttatgaaaccccaatgctgccctttctgctcctttctccacaccccccttggcctcccctccactccttcccaaatctgtctccccagaagacacaggaaacaatgtattgtctgcccagcaatcaaaggcaatgctcaaacacccaagtggcccccaccctcagcccgctcctgcccgcccagcacccccaggccctggggacctggggttctcagactgccaaagaagccttgccatctggcgctcccatggctcttgcaacatctccccttcgtttttgagggggtcatgccgggggagccaccagcccctcactgggttcggaggagagtcaggaagggccacgacaaagcagaaacatcggatttggggaacgcgtgtcatcccttgtgccgcaggctgggcgggagagactgttctgttctgttccttgtgtaactgtgttgctgaaagactacctcgttcttgtcttgatgtgtcaccggggcaactgcctgggggcggggatgggggcagggtggaagcggctccccatttttataccaaaggtgctacatctatgtgatgggtggggtggggagggaatcactggtgctatagaaattgagatgcccccccaggccagcaaatgttcctttttgttcaaagtctatttttattccttgatattttttctttctttttttttttttttgtggatggggacttgtgaatttttctaaaggtgctatttaacatgggaggagagcgtgtgcgctccagcccagcccgctgctcactttccaccctctctccacctgcctctggcttctcaggcctctgctctccgacctctctcctctgaaaccctcctccacagctgcagcccatcctcccggctccctcctagtctgtcctgcgtcctctgtccccgggtttcagagacaacttcccaaagcacaaagcagtttttccctaggggtgggaggaagcaaaagactctgtacctattttgtatgtgtataataatttgagatgtttttaattattttgattgctggaataaagcatgtggaaatgacccaaacataa

SEQ ID NO: 77 - DNA, 1804 bp, Homo sapiens
gtatcactcagaatctggcagccagttccgtcctgacagagttcacagcatatattggtggattcttgtccatagtgcatctgctttaagaattaacgaaagcagtgtcaagacagtaaggattcaaaccatttgccaaaaatgagtctaagtgcatttactctcttcctggcattgattggtggtaccagtggccagtactatgattatgattttcccctatcaatttatgggcaatcatcaccaaactgtgcaccagaatgtaactgccctgaaagctacccaagtgccatgtactgtgatgagctgaaattgaaaagtgtaccaatggtgcctcctggaatcaagtatctttaccttaggaataaccagattgaccatattgatgaaaaggcctttgagaatgtaactgatctgcagtggctcattctagatcacaaccttctagaaaactccaagataaaagggagagttttctctaaattgaaacaactgaagaagctgcatataaaccacaacaacctgacagagtctgtgggcccacttcccaaatctctggaggatctgcagcttactcataacaagatcacaaagctgggctcttttgaaggattggtaaacctgaccttcatccatctccagcacaatcggctgaaagaggatgctgtttcagctgcttttaaaggtcttaaatcactcgaataccttgacttgagcttcaatcagatagccagactgccttctggtctccctgtctctcttctaactctctacttagacaacaataagatcagcaacatccctgatgagtatttcaagcgttttaatgcattgcagtatctgcgtttatctcacaacgaactggctgatagtggaatacctggaaattctttcaatgtgtcatccctggttgagctggatctgtcctataacaagcttaaaaacataccaactgtcaatgaaaaccttgaaaactattacctggaggtcaatcaacttgagaagtttgacataaagagcttctgcaagatcctggggccattatcctactccaagatcaagcatttgcgtttggatggcaatcgcatctcagaaaccagtcttccaccggatatgtatgaatgtctacgtgttgctaacgaagtcactcttaattaatatctgtatcctggaacaatattttatggttatgtttttctgtgtgtcagttttcatagtatccatattttattactgtttattacttccatgaattttaaaatctgagggaaatgttttgtaaacatttattttttttaaagaaaagatgaaaggcaggcctatttcatcacaagaacacacacatatacacgaatagacatcaaactcaatgctttatttgtaaatttagtgtttttttatttctactgtcaaatgatgtgcaaaaccttttactggttgcatggaaatcagccaagttttataatccttaaatcttaatgttcctcaaagcttggattaaatacatatggatgttactctcttgcaccaaattatcttgatacattcaaatttgtctggttaaaaaataggtggtagatattgaggccaagaatattgcaaaatacatgaagcttcatgcacttaaagaagtatttttagaataagaatttgcatacttacctagtgaaacttttctagaattatttttcactctaagtcatgtatgtttctctttgattatttgcatgttatgtttaataagctactagcaaaataaaacatagcaaatgaaaaaaaaaaaaaaaaaaaaaaaaaaaaaaaa

SEQ ID NO: 78 - DNA, 4827 bp, Homo sapiens
gcggtggcgctgcggagacccggtccagacgcctggcggccgccggcacacaaggcgctttctagctccctcccccgagcgcacagcccgcctccttccgcggcgcctgcagtggcaggcttgctctgccctaccgtgacgcgctccggagacgctctgcgggtcctggacaccgggtccgcggcgtggggacgacagacggaggcgaacgccatcggtagccggtccgcgagccatcgttcggggcgcagtcctctccccggctggccctcctttctccggggcattcgccaccgcttccctgggctgagacgaccggttcgtcgcctccttgcccgtgaccgtcgctagaactcagttgtgcgttgcggccagtcgccactgctgagtggaagcaaaatgtcagtcagtgtgcatgagaaccgcaagtccagggccagcagcggctccattaacatctatctgtttcacaagtcctcctacgctgacagcgtcctcactcacctgaatcttttacgccagcagcgtctcttcactgacgtccttctccatgccggaaataggaccttcccttgccaccgggcagtgctggctgcatgcagtcgctactttgaggccatgttcagtggtggcctgaaagagagccaggacagtgaggtcaactttgacaattccatccacccagaagtcttggagctgctgcttgactatgcgtactcctcccgggtcatcatcaatgaagaaaatgcagaatcgctcctggaagctggtgacatgctggagtttcaagacatccgggatgcatgtgcagagttcctggaaaagaacctgcatcccaccaactgcctgggcatgctgctgctgtctgatgcacaccagtgcaccaagctgtacgaactatcttggagaatgtgtctcagcaacttccaaaccatcaggaagaatgaagatttcctccagctgccccaggacatggtagtgcaactcttgtccagtgaagagctggagacagaggatgaaaggcttgtgtacgagtctgcaattaactggatcagctatgacctgaagaagcgctattgctacctcccagaactgttgcagacagtaaggctggcacttctgccagccatctatctcatggagaatgtggccatggaggaactcatcaccaagcagagaaagagtaaggaaattgtggaagaggccatcaggtgcaaactgaaaatcctgcagaatgacggtgtggtaaccagcctctgtgcccgacctcggaaaactggccatgccctcttccttctgggaggacagactttcatgtgtgacaagttgtatctggtagaccagaaggccaaagaaatcattcccaaggctgacattcccagcccaagaaaagagtttagtgcatgtgcgattggctgcaaagtgtacattactggggggcgggggtctgaaaatggggtctcgaaagatgtctgggtttatgataccctgcacgaggagtggtccaaggctgcccccatgctggtggccaggtttggccatggctctgctgaactgaagcactgcctgtatgtggttggggggcacacggccgcaactggctgcctcccggcctccccctcagtctctctaaagcaggtagaacattatgaccccacaatcaacaaatggaccatggtggccccactccgagaaggcgttagcaacgccgcagtagtgagtgccaaacttaagttatttgctttcggaggtaccagtgtcagtcatgacaagctccccaaagttcagtgttacgatcagtgtgaaaacaggtggactgtaccggccacctgtccccagccctggcgttacacagcagcagctgtgctggggaaccagatttttattatggggggtgatacagaattctctgcctgctctgcttataaattcaacagtgagacttaccagtggaccaaagtgggagatgtgacagcaaagcgcatgagctgccatgctgtggcctctggaaacaaactctacgtggttggaggatactttggcattcagcgatgcaagactttggactgctacgatccaacattagacgtgtggaacagcatcaccactgtcccgtactcgctgattcctactgcatttgtcagcacctggaaacatctgccttcttaaatgcagtacattctaaagagagtgagcatgagctcactccatcactcgatgagataatatgagatttctacttcggagaggccaagtctaatgaagagaaaaaaaggaaaagaagttgcaagactcgaataaaatctgctgcaccttgtaaatgctctaactggacatgaaggaaaggggcgagggaggggggtgggatttttggtgcaagtagcacatggtttaaatatgaatgaacaaacctgtgatctagtccttgtcttgtaattgtggattaatgtcaatgttaatcagcccctcaaagggagagaaaagctggaccttttcccttgctgtaccatattcagcatttgatttccatgggccccaccatttatgtgtagaatttgaaatggttgtcacctctctctgaggacagagcttgaagcctccacaccagctgctgctggagattcaaagcccaactgtgggtccgagagggaagctggctgggctggctgaagaatgaagaccactggactctccgttaatctctaaggggtctgctccccaggaacgtttctgaacaatggggactttgttggtagccatttggtagatgttcttttctatttataagtgactttaaactttcccttggctgttaagaagtttgttatagatttagctatttattgttcgatgcctgcatgctgaaacaatgcctacagctgtcttcacatgtatggacgtgtgtgaatggttgtacgttttgcacattttgtggctgttgagatgtgctttgctgcacaaacatgaaaatttttgagttacaatttggagcataactggagggtgggctggggaggggtggatttttaaaatgtcaagacagggaaggatgacaaaatggaaatttaaatgacatcctagaggtagagaaaccgtggagatcgcttttctcagactcaccaacttttaatgggatttcatggggtttggttgtgctgatagggtaaggggaggctgctttctgcccttctccccactcccatctgatttacttaattcagtctcagctgctgaaatttggaaaggaccaaattgctttacagtttttttctttgtgtagtatcttgaaatcctggaaaattctatggaatagttctgtatatagggcacaagtaaaggcattgtccaaagtttatttatttatttattaccctaagaatgctttgccataaccacatttaatgggaaaaacggcatgtatcacagatgtaaattaactcaccagatttactgggcctgaactcattctcttcttgctatatgatttagcaagttctagaaggtctccaagacaataattacattggcacaatgtatacttcagtgctcacccgtagcaaatctctttttaaaaaactctttggtgcacaagtaacacatttggccacaaaacaccaaagaattgtaggcagtggcccctattgagaagttttccggtagagttggaaatcagttgtgaatacattctttgctagttggagtgcttgtttactaagcatgtgccgtcgtaggtattagtgctagtctcaaataggtgcttcccctgaggtgcaggggaagaccaaagtttgcaactcgaactgctttcgtccatgtttctcacattgctgtattttagaaaataggggttaagactgataacaaccttttacattgtgactgtgtttgcattgtctaatgacagataaatccttaacatttctctccaccttagtactttagactaattgtgtttgtccgtccatgccatgaatgagtgggctgtagttgggcctaaataaatgagctgttggaagaaaagaatcacagtactttccagcagtcagtccctggttcctagatgtgttctaagcaatgcaaatgtctaattgtcccccagtgggcatagtcagtgtcgtttatattgtagcagttacagctctgtagtttatgatgcaaatctgccaagagagatgtatgtgtcactgcatggcttctgaaagcaggatgaattttctgcagctgtttcaaagttggggtctgttcttgaatcctctattaattactgtgtgtgagccagagggagctgtggtaagggttgggcccccagcctgtagggaactttctggactcccactctttgaatcgatataggcatttggtctcactacttgaccattctcaccctgtgaaacgtcccacactttgaagcaaatacaattcacagcacagtacacacaaaaaccttggcataagacagagaaggttcttcttattttgtgggctggttgctgtagaaacatataacaaagggcagccctccacttctggtataattgtgtagccccttttctttgggcttgacacctgtcttgaataagagtgattagagctgcataatgtccctctcttggctattgaccatgtggttcacgtacaaaactctgtataagttgaaggaaaatgttcatgttcatatgtacttgtttgctatgactacattttgaggttttgtaaaactgttatttttttttttttcacaatgtgaaactgaaggtcaataaattattagagattttctcttcaaaaaaaaaaaaaaaaaaaaaaaaaaaaaaaaaaaaaaaaaaa

SEQ ID NO: 79 - DNA, 1098 bp, Homo sapiens
cggcacgagggtcccgcgcgctcctccgacccgctccgctccgctccgctcggccccgcgccgcccgtcaacatgatccgctgcggcctggcctgcgagcgctgccgctggatcctgcccctgctcctactcagcgccatcgccttcgacatcatcgcgctggccggccgcggctggttgcagtctagcgaccacggccagacgtcctcgctgtggtggaaatgctcccaagagggcggcggcagcgggtcctacgaggagggctgtcagagcctcatggagtacgcgtggggtagagcagcggctgccatgctcttctgtggcttcatcatcctggtgatctgtttcatcctctccttcttcgccctctgtggaccccagatgcttgtcttcctgagagtgattggaggtctccttgccttggctgctgtgttccagatcatctccctggtaatttaccccgtgaagtacacccagaccttcacccttcatgccaaccctgctgtcacttacatctataactgggcctacggctttgggtgggcagccacgattatcctgattggctgtgccttcttcttctgctgcctcctcaactacgaagatgaccttctgggcaatgccaagcccaggtacttctacacatctgcctaacttgggaatgaatgtgggagaaaatcgctgctgctgagatggactccagaagaagaaactgtttctccaggcgactttgaacccattttttggcagtgttcatattattaaactagtcaaaaatgctaaaataatttgggagaaaatattttttaagtagtgttatagtttcatgtttatcttttattatgttttgtgaagttgtgtcttttcactaattacctatactatgccaatatttccttatatctatccataacatttatactacatttgtaagagaatatgcacgtgaaacttaacactttataaggtaaaaatgaggtttccaagatttaataatctgatcaagttcttgttatttccaaatagaatggactcggtctgttaagggctaaggagaagaggaagataaggttaaaagttgttaatgaccaaacattc

SEQ ID NO: 80 - DNA, 1381 bp, Homo sapiens
atgcgcgatctcccggagcatgcgcagcagcggcgccgacgcggggcggtgcctggtgaccgcgcgcgctcccggaagtgtgccggcgtcgcgcgaaggttcagcagggagccgtgggccgggcgcgcggttcccggcacgtgtctcggcacgtggcagcgcgcctggccctgggcttggaggcgccggcgccctggatccgccggccgtggtcgccgagtcggtgtcgtccttgaccatcgccgacgcgttcattgcagccggcgagagctcagctccgaccccgccgcgccccgcgcttcccaggaggttcatctgctccttccctgactgcagcgccaattacagcaaagcctggaagcttgacgcgcacctgtgcaagcacacgggggagagaccatttgtttgtgactatgaagggtgtggcaaggccttcatcagggactaccatctgagccgccacattctgactcacacaggagaaaagccgtttgtttgtgcagccaatggctgtgatcaaaaattcaacacaaaatcaaacttgaagaaacattttgaacgcaaacatgaaaatcaacaaaaacaatatatatgcagttttgaagactgtaagaagacctttaagaaacatcagcagctgaaaatccatcagtgccagaataccaatgaacctctattcaagtgtacccaggaaggatgtgggaaacactttgcatcacccagcaagctgaaacgacatgccaaggcccacgagggctatgtatgtcaaaaaggatgttcctttgtggcaaaaacatggacggaacttctgaaacatgtgagagaaacccataaagaggaaatactatgtgaagtatgccggaaaacatttaaacgcaaagattaccttaagcaacacatgaaaactcatgccccagaaagggatgtatgtcgctgtccaagagaaggctgtggaagaacctatacaactgtgtttaatctccaaagccatatcctctccttccatgaggaaagccgcccttttgtgtgtgaacatgctggctgtggcaaaacatttgcaatgaaacaaagtctcactaggcatgctgttgtacatgatcctgacaagaagaaaatgaagctcaaagtcaaaaaatctcgtgaaaaacgggagtttggcctctcatctcagtggatatatcctcccaaaaggaaacaagggcaaggcttatctttgtgtcaaaacggagagtcacccaactgtgtggaagacaagatgctctcgacagttgcagtacttacccttggctaagaactgcactgctttgtttaaaggactgcagaccaaggagtcgagctttctctcagagcatgcttttctttattaaaattactgatgcag

SEQ ID NO: 81 - DNA, 1978 bp, Homo sapiens
gggagggtacttagggccggggctggcccaggctacggcggctgcagggctccggcaaccgctccggcaacgccaaccgctccgctgcgcgcaggctgggctgcaggctctcggctgcagcgctgggtggatctaggatccggcttccaacatgtggcagctctgggcctccctctgctgcctgctggtgttggccaatgcccggagcaggccctctttccatcccctgtcggatgagctggtcaactatgtcaacaaacggaataccacgtggcaggccgggcacaacttctacaacgtggacatgagctacttgaagaggctatgtggtaccttcctgggtgggcccaagccaccccagagagttatgtttaccgaggacctgaagctgcctgcaagcttcgatgcacgggaacaatggccacagtgtcccaccatcaaagagatcagagaccagggctcctgtggctcctgctgggccttcggggctgtggaagccatctctgaccggatctgcatccacaccaatgcgcacgtcagcgtggaggtgtcggcggaggacctgctcacatgctgtggcagcatgtgtggggacggctgtaatggtggctatcctgctgaagcttggaacttctggacaagaaaaggcctggtttctggtggcctctatgaatcccatgtagggtgcagaccgtactccatccctccctgtgagcaccacgtcaacggctcccggcccccatgcacgggggagggagatacccccaagtgtagcaagatctgtgagcctggctacagcccgacctacaaacaggacaagcactacggatacaattcctacagcgtctccaatagcgagaaggacatcatggccgagatctacaaaaacggccccgtggagggagctttctctgtgtattcggacttcctgctctacaagtcaggagtgtaccaacacgtcaccggagagatgatgggtggccatgccatccgcatcctgggctggggagtggagaatggcacaccctactggctggttgccaactcctggaacactgactggggtgacaatggcttctttaaaatactcagaggacaggatcactgtggaatcgaatcagaagtggtggctggaattccacgcaccgatcagtactgggaaaagatctaatctgccgtgggcctgtcgtgccagtcctgggggcgagatcggggtagaaatgcattttattctttaagttcacgtaagatacaagtttcagacagggtctgaaggactggattggccaaacatcagacctgtcttccaaggagaccaagtcctggctacatcccagcctgtggttacagtgcagacaggccatgtgagccaccgctgccagcacagagcgtccttccccctgtagactagtgccgtagggagtacctgctgccccagctgactgtggccccctccgtgatccatccatctccagggagcaagacagagacgcaggaatggaaagcggagttcctaacaggatgaaagttcccccatcagttcccccagtacctccaagcaagtagctttccacatttgtcacagaaatcagaggagagatggtgttgggagccctttggagaacgccagtctcccaggccccctgcatctatcgagtttgcaatgtcacaacctctctgatcttgtgctcagcatgattctttaatagaagttttattttttcgtgcactctgctaatcatgtgggtgagccagtggaacagcgggagacctgtgctagttttacagattgcctcctaatgacgcggctcaaaaggaaaccaagtggtcaggagttgtttctgacccactgatctctactaccacaaggaaaatagtttaggagaaaccagcttttactgtttttgaaaaattacagcttcaccctgtcaagttaacaaggaatgcctgtgccaataaaagttttctccaacttgaa

SEQ ID NO: 82 - DNA, 1074 bp, Homo sapiens
ggtcaggaaagctcaggcaagcccaccctcaggcattacagctagactccgagcttactgggcagtcatctgattcgaccaacatcagttcgcagggcttaagcccagtcccttacggcggctggggagggaccaggcccaagtatataaagctccctgagggtccgcgttggctttgcgcctgtgagtgtgattcaagaacgtcccagtgcccttggctcctttcggagtgtgaccccgtgcttgcacgggacacgttacccagctcgggtgagaagggtatcttccgggaacctcgcctttaatagcacaacgagcgcagagtccactggatctgcgagaagaaaccgcgctaactagtttgtccctacggccgcctcgtagtcactgccgcggcgccttgagtctccgggccgccttgccatggctgcccgtggtgtcatcgctccagttggcgagagtttgcgctacgctgagtacttgcagccctcggccaaacggccagacgccgacgtcgaccagcagggactggtaagaagtttgatagctgtaggactgggtgttgcagctcttgcatttgcaggtcgctacgcatttcggatctggaaacctctagaacaagttatcacagaaactgcaaagaagatttcaactcctagcttttcatcctactataaaggaggatttgaacagaaaatgagtaggcgagaagctggtcttattttaggtgtaagcccatctgctggcaaggctaagattagaacagctcataggagagtcatgattttgaatcacccagataaaggtggatctccttacgtagcagccaaaataaatgaagcaaaagacttgctagaaacaaccaccaaacattgatgcttaaggaccacactgaaggaaaaaaaaagaggggacttcgaaaaaaaaaaaagccctgcaaaatattctaaaacatggtcttcttaattttctatatggattgaccacagtcttatcttccaccattaagctgtataacaataaaatgttaatagtcttgctttttattatcttttaaagatctccttaaattct

SEQ ID NO: 83 - DNA, 4098 bp, Homo sapiens
ggtggcctctgtggccgtccaggctagcggcggcccgcaggcggcggggagaaagactctctcacctggtcttgcggctgtggccaccgccggccaggggtgtggagggcgtgctgccggagacgtccgccgggctctgcagttccgccgggggtcgggcagctatggagccgcggcccacggcgccctcctccggcgccccgggactggccggggtcggggagacgccgtcagccgctgcgctggccgcagccagggtggaactgcccggcacggctgtgccctcggtgccggaggatgctgcgcccgcgagccgggacggcggcggggtccgcgatgagggccccgcggcggccggggacgggctgggcagacccttggggcccaccccgagccagagccgtttccaggtggacctggtttccgagaacgccgggcgggccgctgctgcggcggcggcggcggcggcggcagcggcggcggctggtgctggggcgggggccaagcagacccccgcggacggggaagccagcggcgagagcgagccagctaaaggcagcgaggaagccaagggccgcttccgcgtgaacttcgtggacccagctgcctcctcgtcggctgaagacagcctgtcagatgctgccggggtcggagtcgacgggcccaacgtgagcttccagaacggcggggacacggtgctgagcgagggcagcagcctgcactccggcggcggcggcggcagtgggcaccaccagcactactattatgatacccacaccaacacctactacctgcgcaccttcggccacaacaccatggacgctgtgcccaggatcgatcactaccggcacacagccgcgcagctgggcgagaagctgctccggcctagcctggcggagctccacgacgagctggaaaaggaaccttttgaggatggctttgcaaatggggaagaaagtactccaaccagagatgctgtggtcacgtatactgcagaaagtaaaggagtcgtgaagtttggctggatcaagggtgtattagtacgttgtatgttaaacatttggggtgtgatgcttttcattagattgtcatggattgtgggtcaagctggaataggtctatcagtccttgtaataatgatggccactgttgtgacaactatcacaggattgtctacttcagcaatagcaactaatggatttgtaagaggaggaggagcatattatttaatatctagaagtctagggccagaatttggtggtgcaattggtctaatcttcgcctttgccaacgctgttgcagttgctatgtatgtggttggatttgcagaaaccgtggtggagttgcttaaggaacattccatacttatgatagatgaaatcaatgatatccgaattattggagccattacagtcgtgattcttttaggtatctcagtagctggaatggagtgggaagcaaaagctcagattgttcttttggtgatcctacttcttgctattggtgatttcgtcataggaacatttatcccactggagagcaagaagccaaaagggttttttggttataaatctgaaatatttaatgagaactttgggcccgattttcgagaggaagagactttcttttctgtatttgccatcttttttcctgctgcaactggtattctggctggagcaaatatctcaggtgatcttgcagatcctcagtcagccatacccaaaggaacactcctagccattttaattactacattggtttacgtaggaattgcagtatctgtaggttcttgtgttgttcgagatgccactggaaacgttaatgacactatcgtaacagagctaacaaactgtacttctgcagcctgcaaattaaactttgatttttcatcttgtgaaagcagtccttgttcctatggcctaatgaacaacttccaggtaatgagtatggtgtcaggatttacaccactaatttctgcaggtatattttcagccactctttcttcagcattagcatccctagtgagtgctcccaaaatatttcaggctctatgtaaggacaacatctacccagctttccagatgtttgctaaaggttatgggaaaaataatgaacctcttcgtggctacatcttaacattcttaattgcacttggattcatcttaattgctgaactgaatgttattgcaccaattatctcaaacttcttccttgcatcatatgcattgatcaatttttcagtattccatgcatcacttgcaaaatctccaggatggcgtcctgcattcaaatactacaacatgtggatatcacttcttggagcaattctttgttgcatagtaatgttcgtcattaactggtgggctgcattgctaacatatgtgatagtccttgggctgtatatttatgttacctacaaaaaaccagatgtgaattggggatcctctacacaagccctgacttacctgaatgcactgcagcattcaattcgtctttctggagtggaagaccacgtgaaaaactttaggccacagtgtcttgttatgacaggtgctccaaactcacgtccagctttacttcatcttgttcatgatttcacaaaaaatgttggtttgatgatctgtggccatgtacatatgggtcctcgaagacaagccatgaaagagatgtccatcgatcaagccaaatatcagcgatggcttattaagaacaaaatgaaggcattttatgctccagtacatgcagatgacttgagagaaggtgcacagtatttgatgcaggctgctggtcttggtcgtatgaagccaaacacacttgtccttggatttaagaaagattggttgcaagcagatatgagggatgtggatatgtatataaacttatttcatgatgcttttgacatacaatatggagtagtggttattcgcctaaaagaaggtctggatatatctcatcttcaaggacaagaagaattattgtcatcacaagagaaatctcctggcaccaaggatgtggtagtaagtgtggaatatagtaaaaagtccgatttagatacttccaaaccactcagtgaaaaaccaattacacacaaagttgaggaagaggatggcaagactgcaactcaaccactgttgaaaaaagaatccaaaggccctattgtgcctttaaatgtagctgaccaaaagcttcttgaagctagtacacagtttcagaaaaaacaaggaaagaatactattgatgtctggtggctttttgatgatggaggtttgaccttattgataccttaccttctgacgaccaagaaaaaatggaaagactgtaagatcagagtattcattggtggaaagataaacagaatagaccatgaccggagagcgatggctactttgcttagcaagttccggatagacttttctgatatcatggttctaggagatatcaataccaaaccaaagaaagaaaatattatagcttttgaggaaatcattgagccatacagacttcatgaagatgataaagagcaagatattgcagataaaatgaaagaagatgaaccatggcgaataacagataatgagcttgaactttataagaccaagacataccggcagatcaggttaaatgagttattaaaggaacattcaagcacagctaatattattgtcatgagtctcccagttgcacgaaaaggtgctgtgtctagtgctctctacatggcatggttagaagctctatctaaggacctaccaccaatcctcctagttcgtgggaatcatcagagtgtccttaccttctattcataaatgttctatacagtggacagccctccagaatggtacttcagtgcctagtgtagtaacctgaaatcttcaatgacacattaacatcacaatggcgaatggtgacttttctttcacgatttcattaatttgaaagcacacaggaaagcttgctccattgataacgtgtatggagacttcggttttagtcaattccatatctcaatcttaatggtgattcttctctgttgaactgaagtttgtgagagtagttttcctttgctacttgaatagcaataaaagcgtgttaactttttgg

SEQ ID NO: 84 - DNA, 3120 bp, Homo sapiens
aaaggaaacacaagttgcttttgataacacatgatgcaaagaaagaattagaaagaatgagcaatgaagccggtataaatgacaaacaagtgtccaaaggcccaagaagttactaccaaaagctttcaaacaatattggtttatctttaaagacacatccatagcatactttaaaaataaggaacttgaacaaggagaaccacaagaaaaactaaatcttagaggctgcgaagttgtgcccgatgtaaatgtagcaggaagaaaatttggaatcaagttactaatccctgttgccgatggtatgaatgaaatgtatttgagatgtgaccatgagaatcaatacgcccaatggatggctgcctgcatgttggcatcgaagggcaaaaccatggcagacagctcctaccagccagaggtcctcaacatcctttcatttctgaggatgaaaaacaggaactctgcatctcaggtggcttccagtctcgaaaacatggatatgaacccagaatgttttgtgtcaccacggtgtgcaaaaagacacaaatccaaacagctggccgcccggatcctggaggcgcaccagaacgtggcccagatgcccctggtcgaagccaagctgcggttcatccaggcgtggcagtcactgcctgagtttggcctcacctactaccttgtcagatttaaaggaagcaaaaaagatgacattctgggagtttcatataacaggttgattaaaattgatgcagccaccgggattccagtgacaacatggagattcacaaatatcaaacagtggaatgtaaactgggaaacccggcaggtggtcatcgagtttgaccaaaacgtctttactgctttcacctgcctgagtgcagattgcaagattgtgcacgagtacattggcggctacattttcttgtccacccgctccaaggaccagaatgaaacactcgatgaggacttgttccacaaattgaccggcggtcaggattgaaacaagcacgcgtgctcggctcacaccaacaaggcaagccaaaggcgcccctccccagagggatccctaacgtgcccagcatgtagattctggactaacagacaacatacattcaccgctggtcacccagatcctcattcaaacccactgctggcacatccctttccttactttgccctgtgctaccagccacggaaggagcctctcttgttttttctataaaatgggtaggcaggagaaaagcaggtgccctaagattgctctaaggcccagcatgtggttacagttctctgacttgcagaacctgccaggtgtatggctacaagttatcctcgtgctgatctgtctcattactaagtcaatggagaagacagaaaggtaaaaatcacgtgtagcaagaacaactcttatttcacaaactcaggtatgaaacgaaacgcctgtccttcatggaactgcttttagctcctgtcttttcaaaatggcagagggagttcctacacacactttttccctggaggccaaggtctaggggtagaaaggggaggggtggggctaccaggtagcagttgacaacccaaggtcagaggagtggccctcagtgtcatctgtccacagtgatacctgccaagatgaccactgacccacatctggtcttagtcattggtctcctcagatttctggggccacctgcaagccccattccattcctacagatctctcagccacctgtaagtcctttgtgaagatgtgggtgacacagggggacaggaaaacccatttctcaacccagatccatgtctccactgcttctactctgggttgggattcaggaagacaggcacagtcctctctgttcatagaaacacctgccagtgtcaaggattccagtcaggtgtctatcccaactggtcagggagagaagggcagacccattctcaaagaccaccatgttcaaggtctgacagctccccactggctgcccccacaggggctttaggctggtctgggtcatggggaagcgtccctcttatcgctggtctgtgttctcctggatttggtatctatgttggtacgactcctggccttttatctaaaggactttggcttttgtaaatcacaagccaataatagacttttttctccccctctgttttttgctgtgtcatctctgccttgagactgccttgagacagtgcttgccctgagagagtgagccaattaacagctgcctgaattgtcattttccattttggtttgttagaggtgggaggggtgggttttgagaaggtcaaaagcaataccagaagtaaagggaaatatcagacaatattttattattttttcatagatgttctgccacacaaagaacttggggtgtaaggataaggcaaaagctccaatcccatttttcagttctcctaggatgcacccctcagggagcctggccagagttccgaggcccgtgagcgtcagctgttgctttattttccatcaaagccctctgagaagtgagacctcagcaattccgggagccacatagagacagacttggcaagggaccccctggttctgagccagtagctgccatctggaaattcctcttttagcctctccttagaggtgaatgtgaatgaagcctcccaggcacccgctgaatttctgaggccttgcttaaagctcagaagtggtttaggcatttggaaaatctggttcacatcataaagaacttgatttgaaatgttttctatagaaacaagtgctaagtgtaccgtattatacttgatgttggtcatttctcagtcctatttctcagttctattattttagaacctagtcagttctttaagattataactggtcctacattaaaataatgcttctcgatgtcagattttacctgtttgctgctgagaacatctctgcctaatttaccaaagccagaccttcagttcaacatgcttccttagcttttcatagttgtctgacatttccatgaaaacaaaggaaccaactttgttttaaccaaactttgtttggttacagttttcaggggagcgtttcttccatgacacacagcaacatcccaaagaaataaacaagtgtgacaaaaaaaaaaaaaaaaa

SEQ ID NO: 85 - DNA, 1337 bp, Homo sapiens
ctggcgtcccctttccggccggtccccatggaggcgctggggaagctgaagcagttcgatgcctaccccaagactttggaggacttccgggtcaagacctgcgggggcgccaccgtgaccattgtcagtggccttctcatgctgctactgttcctgtccgagctgcagtattacctcaccacggaggtgcatcctgagctctacgtggacaagtcgcggggagataaactgaagatcaacatcgatgtactttttccgcacatgccttgtgcctatctgagtattgatgccatggatgtggccggagaacagcagctggatgtggaacacaacctgttcaagcaacgactagataaagatggcatccccgtgagctcagaggctgagcggcatgagcttgggaaagtcgaggtgacggtgtttgaccctgactccctggaccctgatcgctgtgagagctgctatggtgctgaggcagaagatatcaagtgctgtaacacctgtgaagatgtgcgggaggcatatcgccgtagaggctgggccttcaagaacccagatactattgagcagtgccggcgagagggcttcagccagaagatgcaggagcagaagaatgaaggctgccaggtgtatggcttcttggaagtcaataaggtggccggaaacttccactttgcccctgggaagagcttccagcagtcccatgtgcacgtccatgacttgcagagctttggccttgacaacatcaacatgacccactacatccagcacctgtcatttggggaggactatccaggcattgtgaaccccctggaccacaccaatgtcactgcgccccaagcctccatgatgttccagtactttgtgaaggtggtgcccactgtgtacatgaaggtggacggagaggtactgaggacaaatcagttctctgtgaccagacatgagaaggttgccaatgggctgttgggcgaccaaggccttcccggagtcttcgtcctctatgagctctcgcccatgatggtgaagctgacggagaagcacaggtccttcacccacttcctgacaggtgtgtgcgccatcattgggggcatgttcacagtggctggactcatcgattcgctcatctaccactcagcacgagccatccagaagaaaattgatctagggaagacaacgtagtcaccctcggtgcttcctctgtctcctctttctccctggcctgtggttgtcccccagcctctgccaccctccacctcctcggtcagccccagccccaggttgataaatctattgattgattgtgatagtaaaaaaaaaaaaaaaaaaaaaaaaaaaaa

SEQ ID NO: 86 - DNA, 2908 bp, Homo sapiens
ctgctcgcggcgccgcctcctgctcctcccgctgctgctgccgctgccgccctgagtcactgcctgcgcagctccggccgcctggctccccatactagtcgccgatatttggagttcttacaacatggcagacattgacaacaaagaacagtctgaacttgatcaagatttggatgatgttgaagaagtagaagaagaggaaactggtgaagaaacaaaactcaaagcacgtcagctaactgttcagatgatgcaaaatcctcagattcttgcagcccttcaagaaagacttgatggtctggtagaaacaccaacaggatacattgaaagcctgcctagggtagttaaaagacgagtgaatgctctcaaaaacctgcaagttaaatgtgcacagatagaagccaaattctatgaggaagttcacgatcttgaaaggaagtatgctgttctctatcagcctctatttgataagcgatttgaaattattaatgcaatttatgaacctacggaagaagaatgtgaatggaaaccagatgaagaagatgagatttcggaggaattgaaagaaaaggccaagattgaagatgagaaaaaggatgaagaaaaagaagaccccaaaggaattcctgaattttggttaactgtttttaagaatgttgacttgctcagtgatatggttcaggaacacgatgaacctattctgaagcacttgaaagatattaaagtgaagttctcagatgctggccagcctatgagttttgtcttagaatttcactttgaacccaatgaatattttacaaatgaagtgctgacaaagacatacaggatgaggtcagaaccagatgattctgatcccttttcttttgatggaccagaaattatgggttgtacagggtgccagatagattggaaaaaaggaaagaatgtcactttgaaaactattaagaagaagcagaaacacaagggacgtgggacagttcgtactgtgactaaaacagtttccaatgactctttctttaacttttttgcccctcctgaagttcctgagagtggagatctggatgatgatgctgaagctatccttgctgcagacttcgaaattggtcactttttacgtgagcgtataatcccaagatcagtgttatattttactggagaagctattgaagatgatgatgatgattatgatgaagaaggtgaagaagcggatgaggaaggggaagaagaaggagatgaggaaaatgatccagactatgacccaaagaaggatcaaaacccagcagagtgcaagcagcagtgaagcaggatgtatgtggccttgaggataacctgcactggtctaccttctgcttccctggaaaggatgaatttacatcatttgacaagcctattttcaagttatttgttgtttgtttgcttgtttttgtttttgcagctaaaataaaaatttcaaatacaattttagttcttacaagataatgtcttaattttgtaccaattcaggtagaagtagaggcctaccttgaattaagggttatactcagtttttaacacattgttgaagaaaaggtaccagctttggaacgagatgctatactaataagcaagtgtaaaaaaaaaaaaaaaagaggaagaaaatcttaagtgattgatgctgttttcttttaaaaaaaaaaaaaaaaattcattttctttgggttagagctagagagaaggccccaagcttctatggtttcttctaattcttattgcttaaagtatgagtatgtcacttacccgtgcttctgtttactgtgtaattaaaatgggtagtactgtttacctaactacctcatggatgtgttaaggcatattgagttaaatctcatataatgtttctcaatcttgttaaaagctcaaaattttgggcctatttgtaatgccagtgtgacactaagcattttgttcacaccacgctttgataactaaactggaaaacaaaggtgttaagtacctctgttctggatctgggcagtcagcactctttttagatctttgtgtggctcctatttttatagaagtggagggatgcactatttcacaaggtccaagatttgttttcagatatttttgatgactgtattgtaaatactacagggatagcactatagtattgtagtcatgagacttaaagtggaaataagactatttttgacaaaagatgccattaaatttcagactgtagagccacatttacaatacctcaggctaattactgttaattttggggttgaactttttttgacagtgagggtggattattggattgtcattagaggaaggtctagatttcctgctcttaataaaattacattgaattgatttttagaggtaatgaaaacttcctttctgagaagttagtgttaaggtcttggaatgtgaacacattgtttgtagtgctatccattcctctcctgagattttaacttactactggaaatccttaaccaattataatagctttttttctttattttcaaaatgatttcctttgctttgattagacactatgtgctttttttttttaaccatagttcatcgaaatgcagctttttctgaacttcaaagatagaatcccatttttaatgaactgaagtagcaaaatcatctttttcattctttaggaaatagctattgccaaagtgaaggtgtagataatacctagtcttgttacataaaggggatgtggtttgcagaagaattttctttataaaattgaagttttaagggacgtcagtgtttatgccatttttccagttccaaaatgattccattccattctagaaatttgaagtatgtaacctgaaatccttaataaaatttggatttaattttataaaaaaaaaaaaaaaaaaaaaaaaaaaaaaaa

SEQ ID NO: 87 - DNA, 3213 bp, Homo sapiens
agagactcaagatgattccctttttacccatgttttctctactattgctgcttattgttaaccctataaacgccaacaatcattatgacaagatcttggctcatagtcgtatcaggggtcgggaccaaggcccaaatgtctgtgcccttcaacagattttgggcaccaaaaagaaatacttcagcacttgtaagaactggtataaaaagtccatctgtggacagaaaacgactgttttatatgaatgttgccctggttatatgagaatggaaggaatgaaaggctgcccagcagttttgcccattgaccatgtttatggcactctgggcatcgtgggagccaccacaacgcagcgctattctgacgcctcaaaactgagggaggagatcgagggaaagggatccttcacttactttgcaccgagtaatgaggcttgggacaacttggattctgatatccgtagaggtttggagagcaacgtgaatgttgaattactgaatgctttacatagtcacatgattaataagagaatgttgaccaaggacttaaaaaatggcatgattattccttcaatgtataacaatttggggcttttcattaaccattatcctaatggggttgtcactgttaattgtgctcgaatcatccatgggaaccagattgcaacaaatggtgttgtccatgtcattgaccgtgtgcttacacaaattggtacctcaattcaagacttcattgaagcagaagatgacctttcatcttttagagcagctgccatcacatcggacatattggaggcccttggaagagacggtcacttcacactctttgctcccaccaatgaggcttttgagaaacttccacgaggtgtcctagaaaggttcatgggagacaaagtggcttccgaagctcttatgaagtaccacatcttaaatactctccagtgttctgagtctattatgggaggagcagtctttgagacgctggaaggaaatacaattgagataggatgtgacggtgacagtataacagtaaatggaatcaaaatggtgaacaaaaaggatattgtgacaaataatggtgtgatccatttgattgatcaggtcctaattcctgattctgccaaacaagttattgagctggctggaaaacagcaaaccaccttcacggatcttgtggcccaattaggcttggcatctgctctgaggccagatggagaatacactttgctggcacctgtgaataatgcattttctgatgatactctcagcatggttcagcgcctccttaaattaattctgcagaatcacatattgaaagtaaaagttggccttaatgagctttacaacgggcaaatactggaaaccatcggaggcaaacagctcagagtcttcgtatatcgtacagctgtctgcattgaaaattcatgcatggagaaagggagtaagcaagggagaaacggtgcgattcacatattccgcgagatcatcaagccagcagagaaatccctccatgaaaagttaaaacaagataagcgctttagcaccttcctcagcctacttgaagctgcagacttgaaagagctcctgacacaacctggagactggacattatttgtgccaaccaatgatgcttttaagggaatgactagtgaagaaaaagaaattctgatacgggacaaaaatgctcttcaaaacatcattctttatcacctgacaccaggagttttcattggaaaaggatttgaacctggtgttactaacattttaaagaccacacaaggaagcaaaatctttctgaaagaagtaaatgatacacttctggtgaatgaattgaaatcaaaagaatctgacatcatgacaacaaatggtgtaattcatgttgtagataaactcctctatccagcagacacacctgttggaaatgatcaactgctggaaatacttaataaattaatcaaatacatccaaattaagtttgttcgtggtagcaccttcaaagaaatccccgtgactgtctatacaactaaaattataaccaaagttgtggaaccaaaaattaaagtgattgaaggcagtcttcagcctattatcaaaactgaaggacccacactaacaaaagtcaaaattgaaggtgaacctgaattcagactgattaaagaaggtgaaacaataactgaagtgatccatggagagccaattattaaaaaatacaccaaaatcattgatggagtgcctgtggaaataactgaaaaagagacacgagaagaacgaatcattacaggtcctgaaataaaatacactaggatttctactggaggtggagaaacagaagaaactctgaagaaattgttacaagaagaggtcaccaaggtcaccaaattcattgaaggtggtgatggtcatttatttgaagatgaagaaattaaaagactgcttcagggagacacacccgtgaggaagttgcaagccaacaaaaaagttcaaggttctagaagacgattaagggaaggtcgttctcagtgaaaatccaaaaaccagaaaaaaatgtttatacaaccctaagtcaataacctgaccttagaaaattgtgagagccaagttgacttcaggaactgaaacatcagcacaaagaagcaatcatcaaataattctgaacacaaatttaatatttttttttctgaatgagaaacatgagggaaattgtggagttagcctcctgtggtaaaggaattgaagaaaatataacaccttacaccctttttcatcttgacattaaaagttctggctaactttggaatccattagagaaaaatccttgtcaccagattcattacaattcaaatcgaagagttgtgaactgttatcccattgaaaagaccgagccttgtatgtatgttatggatacataaaatgcacgcaagccattatctctccatgggaagctaagttataaaaataggtgcttggtgtacaaaactttttatatcaaaaggctttgcacatttctatatgagtgggtttactggtaaattatgttattttttacaactaattttgtactctcagaatgtttgtcatatgcttcttgcaatgcatattttttaatctcaaacgtttcaataaaaccatttttcagatataaagagaattacttcaaattgagtaattcagaaaaactcaagatttaagttaaaaagtggtttggacttgggaa

SEQ ID NO: 88 - DNA, 10558 bp, Homo sapiens
cagtttggagctcagtcttccaccaaaggccgttcagttctcctgggctccagcctcctgcaaggactgcaagagttttcctccgcagctctgagtctccacttttttggtggagaaaggctgcaaaaagaaaaagagacgcagtgagtgggaaaagtatgcatcctattcaaacctaattgaatcgaggagcccagggacacacgccttcaggtttgctcaggggttcatatttggtgcttagacaaattcaaaatgaggaaacatcggcacttgcccttagtggccgtcttttgcctctttctctcaggctttcctacaactcatgcccagcagcagcaagcagatgtcaaaaatggtgcggctgctgatataatatttctagtggattcctcttggaccattggagaggaacatttccaacttgttcgagagtttctatatgatgttgtaaaatccttagctgtgggagaaaatgatttccattttgctctggtccagttcaacggaaacccacataccgagttcctgttaaatacgtatcgtactaaacaagaagtcctttctcatatttccaacatgtcttatattgggggaaccaatcagactggaaaaggattagaatacataatgcaaagccacctcaccaaggctgctggaagccgggccggtgacggagtccctcaggttatcgtagtgttaactgatggacactcgaaggatggccttgctctgccctcagcggaacttaagtctgctgatgttaacgtgtttgcaattggagttgaggatgcagatgaaggagcgttaaaagaaatagcaagtgaaccgctcaatatgcatatgttcaacctagagaattttacctcacttcatgacatagtaggaaacttagtgtcctgtgtgcattcatccgtgagtccagaaagggctggggacacggaaacccttaaagacatcacagcacaagactctgctgacattattttccttattgatggatcaaacaacaccggaagtgtcaatttcgcagtcattctcgacttccttgtaaatctccttgagaaactcccaattggaactcagcagatccgagtgggggtggtccagtttagcgatgagcccagaaccatgttttccttggacacctactccaccaaggcccaggttctgggtgcagtgaaagccctcgggtttgctggtggggagttggccaatatcggcctcgcccttgatttcgtggtggagaaccacttcacccgggcagggggcagccgcgtggaggaaggggttccccaggtgctggtcctcataagtgccgggccttctagtgacgagattcgctacggggtggtagcactgaagcaggctagcgtgttctcattcggccttggagcccaggccgcctccagggcagagcttcagcacatagctaccgatgacaacttggtgtttactgtcccggaattccgtagctttggggacctccaggagaaattactgccgtacattgttggcgtggcccaaaggcacattgtcttgaaaccgccaaccattgtcacacaagtcattgaagtcaacaagagagacatagtcttcctggtggatggctcatctgcactgggactggccaacttcaatgccatccgagacttcattgctaaagtcatccagaggctggaaatcggacaggatcttatccaggtggcagtggcccagtatgcagacactgtgaggcctgaattttatttcaatacccatccaacaaaaagggaagtcataaccgctgtgcggaaaatgaagcccctggacggctcggccctgtacacgggctctgctctagactttgttcgtaacaacctattcacgagttcagccggctaccgggctgccgaggggattcctaagcttttggtgctgatcacaggtggtaagtccctagatgaaatcagccagcctgcccaggagctgaagagaagcagcataatggcctttgccattgggaacaagggtgccgatcaggctgagctggaagagatcgctttcgactcctccctggtgttcatcccagctgagttccgagccgccccattgcaaggcatgctgcctggcttgctggcacctctcaggaccctctctggaacccctgaagttcactcaaacaaaagagatatcatctttcttttggatggatcagccaacgttggaaaaaccaatttcccttatgtgcgcgactttgtaatgaacctagttaacagccttgatattggaaatgacaatattcgtgttggtttagtgcaatttagtgacactcctgtaacggagttctctttaaacacataccagaccaagtcagatatccttggtcatctgaggcagctgcagctccagggaggttcgggcctgaacacaggctcagccctaagctatgtctatgccaaccacttcacggaagctggcggcagcaggatccgtgaacacgtgccgcagctcctgcttctgctcacagctgggcagtctgaggactcctatttgcaagctgccaacgccttgacacgcgcgggcatcctgactttttgtgtgggagctagccaggcgaataaggcagagcttgagcagattgcttttaacccaagcctggtgtatctcatggatgatttcagctccctgccagctttgcctcagcagctgattcagcccctaaccacatatgttagtggaggtgtggaggaagtaccactcgctcagccagagagcaagcgagacattctgttcctctttgacggctcagccaatcttgtgggccagttccctgttgtccgtgactttctctacaagattatcgatgagctcaatgtgaagccagaggggacccgaattgcggtggctcagtacagcgatgatgtcaaggtggagtcccgttttgatgagcaccagagtaagcctgagatcctgaatcttgtgaagagaatgaagatcaagacgggcaaagccctcaacctgggctacgcgctggactatgcacagaggtacatttttgtgaagtctgctggcagccggatcgaggatggagtgcttcagttcctggtgctgctggtcgcaggaaggtcatctgaccgtgtggatgggccagcaagtaacctgaagcagagtggggttgtgcctttcatcttccaagccaagaacgcagaccctgctgagttagagcagatcgtgctgtctccagcgtttatcctggctgcagagtcgcttcccaagattggagatcttcatccacagatagtgaatctcttaaaatcagtgcacaacggagcaccagcaccagtttcaggtgaaaaggacgtggtgtttctgcttgatggctctgagggcgtcaggagcggcttccctctgttgaaagagtttgtccagagagtggtggaaagcctggatgtgggccaggaccgggtccgcgtggccgtggtgcagtacagcgaccggaccaggcccgagttctacctgaattcatacatgaacaagcaggacgtcgtcaacgctgtccgccagctgaccctgctgggagggccgacccccaacaccggggccgccctggagtttgtcctgaggaacatcctggtcagctctgcgggaagcaggataacagaaggtgtgccccagctgctgatcgtcctcacggccgacaggtctggggatgatgtgcggaacccctccgtggtcgtgaagaggggtggggctgtgcccattggcattggcatcgggaacgctgacatcacagagatgcagaccatctccttcatcccggactttgccgtggccattcccacctttcgccagctggggaccgtccaacaggtcatctctgagagggtgacccagctcacccgcgaggagctgagcaggctgcagccggtgttgcagcctctaccgagcccaggtgttggtggcaagagggacgtggtctttctcatcgatgggtcccaaagtgccgggcctgagttccagtacgttcgcaccctcatagagaggctggttgactacctggacgtgggctttgacaccacccgggtggctgtcatccagttcagcgatgaccccaaggcggagttcctgctgaacgcccattccagcaaggatgaagtgcagaacgcggtgcagcggctgaggcccaagggagggcggcagatcaacgtgggcaatgccctggagtacgtgtccaggaacatcttcaagaggcccctggggagccgcattgaagagggcgtcccacagttcctggtcctcatctcgtctggaaagtctgacgatgaggtggtcgtcccggcggtggagctcaagcagtttggcgtggcccctttcacgatcgccaggaacgcagaccaggaggagctggtgaagatctcgctgagccccgaatatgtgttctcggtgagcaccttccgggagctgcccagcctggagcagaaactgctgacgcccatcacgaccctgacctcagagcagatccagaagctcttagccagcactcgctatccacctccagcagttgagagtgatgctgcagacattgtctttctgatcgacagctctgagggagttaggccagatggctttgcacatattcgagattttgttagcaggattgttcgaagactcaacatcggccccagtaaagtgagagttggggtcgtgcagttcagcaatgatgtcttcccagaattctatctgaaaacctacagatcccaggccccggtgctggacgccatacggcgcctgaggctcagaggggggtccccactgaacactggcaaggctctcgaatttgtggcaagaaacctctttgttaagtctgcggggagtcgcatagaagacggggtgccccaacacctggtcctggtcctgggtggaaaatcccaggacgatgtgtccaggttcgcccaggtgatccgttcctcgggcattgtgagtttaggggtaggagaccggaacatcgacagaacagagctgcagaccatcaccaatgaccccagactggtcttcacagtgcgagagttcagagagcttcccaacatagaagaaagaatcatgaactcgtttggaccctccgcagccactcctgcacctccaggggtggacacccctcctccttcacggccagagaagaagaaagcagacattgtgttcctgttggatggttccatcaacttcaggagggacagtttccaggaagtgcttcgttttgtgtctgaaatagtggacacagtttatgaagatggcgactccatccaagtggggcttgtccagtacaactctgaccccactgacgaattcttcctgaaggacttctctaccaagaggcagattattgacgccatcaacaaagtggtctacaaagggggaagacacgccaacactaaggtgggccttgagcacctgcgggtaaaccactttgtgcctgaggcaggcagccgcctggaccagcgggtccctcagattgcctttgtgatcacgggaggaaagtcggtggaagatgcacaggatgtgagcctggccctcacccagaggggggtcaaagtgtttgctgttggagtgaggaatatcgactcggaggaggttggaaagatagcgtccaacagcgccacagcgttccgcgtgggcaacgtccaggagctgtccgaactgagcgagcaagttttggaaactttgcatgatgcgatgcatgaaaccctttgccctggtgtaactgatgctgccaaagcttgtaatctggatgtgattctggggtttgatggttctagagaccagaatgtttttgtggcccagaagggcttcgagtccaaggtggacgccatcttgaacagaatcagccagatgcacagggtcagctgcagcggtggccgctcgcccaccgtgcgtgtgtcagtggtggccaacacgccctcgggcccggtggaggcctttgactttgacgagtaccagccagagatgctcgagaagttccggaacatgcgcagccagcacccctacgtcctcacggaggacaccctgaaggtctacctgaacaagttcagacagtcctcgccggacagcgtgaaggtggtcattcattttactgatggagcagacggagatctggctgatttacacagagcatctgagaacctccgccaagaaggagtccgtgccttgatcctggtgggccttgaacgagtggtcaacttggagcggctaatgcatctggagtttgggcgagggtttatgtatgacaggcccctgaggcttaacttgctggacttggattatgaactagcggagcagcttgacaacattgccgagaaagcttgctgtggggttccctgcaagtgctctgggcagaggggagaccgcgggcccatcggcagcatcgggccaaagggtattcctggagaagacggctaccgaggctatcctggtgatgagggtggacccggtgagcgtggtccgcctggtgtgaacggcactcaaggtttccagggctgcccgggccagagaggagtaaagggctctcggggattcccaggagagaagggcgaagtaggagaaattggactggatggtctggatggtgaagatggagacaaaggattgcctggttcttctggagagaaagggaatcctggaagaaggggtgataaaggacctcgaggagagaaaggagaaagaggagatgttgggattcgaggggacccgggtaacccaggacaagacagccaggagagaggacccaaaggagaaaccggtgacctcggccccatgggtgtcccagggagagatggagtacctggaggacctggagaaactgggaagaatggtggctttggccgaaggggaccccccggagctaagggcaacaagggcggtcctggccagccgggctttgagggagagcaggggaccagaggtgcacagggcccagctggtcctgctggtcctccagggctgataggagaacaaggcatttctggacctaggggaagcggaggtgcccgtggcgctcctggagaacgaggcagaaccggtccactgggaagaaagggtgagcccggagagccaggaccaaaaggaggaatcgggaacccgggccctcgtggggagacgggagatgacgggagagacggagttggcagtgaaggacgcagaggcaaaaaaggagaaagaggatttcctggatacccaggaccaaagggtaacccaggtgaacctgggctaaatggaacaacaggacccaaaggcatcagaggccgaaggggaaattcgggacctccagggatagttggacagaaggggagacctggctacccaggaccagctggtccaaggggcaacaggggcgactccatcgatcaatgtgccctcatccaaagcatcaaagataaatgcccttgctgttacgggcccctggagtgccccgtcttcccaacagaactagcctttgctttagacacctctgagggagtcaaccaagacactttcggccggatgcgagatgtggtcttgagtattgtgaatgtcctgaccattgctgagagcaactgcccgacgggggcccgggtggctgtggtcacctacaacaacgaggtgaccacggagatccggtttgctgactccaagaggaagtcggtcctcctggacaagattaagaaccttcaggtggctctgacatccaaacagcagagtctggagactgccatgtcgtttgtggccaggaacacatttaagcgtgtgaggaacggattcctaatgaggaaagtggctgttttcttcagcaacacacccacaagagcatccccacagctcagagaggctgtgctcaaactctcagatgcggggatcacccccttgttccttacaaggcaggaagaccggcagctcatcaacgctttgcagatcaataacacagcagtggggcatgcgcttgtcctgcctgcagggagagacctcacagacttcctggagaatgtcctcacgtgtcatgtttgcttggacatctgcaacatcgacccatcctgtggatttggcagttggaggccttccttcagggacaggagagcggcagggagtgatgtggacatcgacatggctttcatcttagacagcgctgagaccaccaccctgttccagttcaatgagatgaagaagtacatagcgtacctggtcagacaactggacatgagcccagatcccaaggcctcccagcacttcgccagagtggcagttgtgcagcacgcgccctctgagtccgtggacaatgccagcatgccacctgtgaaggtggaattctccctgactgactatggctccaaggagaagctggtggacttcctcagcaggggaatgacacagttgcagggaaccagggccttaggcagtgccattgaatacaccatagagaatgtctttgaaagtgccccaaacccacgggacctgaaaattgtggtcctgatgctgacgggcgaggtgccggagcagcagctggaggaggcccagagagtcatcctgcaggccaaatgcaagggctacttcttcgtggtcctgggcattggcaggaaggtgaacatcaaggaggtatacaccttcgccagtgagccaaacgacgtcttcttcaaattagtggacaagtccaccgagctcaacgaggagcctttgatgcgcttcgggaggctgttgccgtccttcgtcagcagtgaaaatgctttttacttgtccccagatatcaggaaacagtgtgattggttccaaggggaccaacccacaaagaaccttgtgaagtttggtcacaaacaagtaaatgttccgaataacgttacttcaagtcctacatccaacccagtgacgacaacgaagccggtgactacgacgaagccggtgaccaccacaacaaagcctgtaaccaccacaacaaagcctgtgactattataaatcagccatctgtgaagccagccgctgcaaagccggcccctgcgaaacctgtggctgccaagcctgtggccacaaagacggccactgttagacccccagtggcggtgaagccagcaacagcagcgaagcctgtagcagcaaagccagcagctgtaagaccccccgctgctgctgcaaaaccagtggcgaccaagcctgaggtccctaggccacaggcagccaaaccagctgccaccaagccagccaccactaagcccgtggttaagatgctccgtgaagtccaggtgtttgagataacagagaacagcgccaaactccactgggagaggcctgagccccccggtccttatttttatgacctcaccgtcacctcagcccatgatcagtccctggttctgaagcagaacctcacggtcacggaccgcgtcattggaggcctgctcgctgggcagacataccatgtggctgtggtctgctacctgaggtctcaggtcagagccacctaccacggaagtttcagtacaaagaaatctcagcccccacctccacagccagcaaggtcagcttctagttcaaccatcaatctaatggtgagcacagaaccattggctctcactgaaacagatatatgcaagttgccgaaagacgaaggaacttgcagggatttcatattaaaatggtactatgatccaaacaccaaaagctgtgcaagattctggtatggaggttgtggtggaaacgaaaacaaatttggatcacagaaagaatgtgaaaaggtttgcgctcctgtgctcgccaaacccggagtcatcagtgtgatgggaacctaagcgtgggtggccaacatcatatacctcttgaagaagaaggagtcagccatcgccaacttgtctctgtagaagctccgggtgtagattcccttgcactgtatcatttcatgctttgatttacactcgaactcgggagggaacatcctgctgcatgacctatcagtatggtgctaatgtgtctgtggaccctcgctctctgtctccagcagttctctcgaatactttgaatgttgtgtaacagttagccactgctggtgtttatgtgaacattcctatcaatccaaattccctctggagtttcatgttatgcctgttgcaggcaaatgtaaagtctagaaaataatgcaaatgtcacggctactctatatacttttgcttggttcattttttttcccttttagttaagcatgactttagatgggaagcctgtgtatcgtggagaaacaagagaccaactttttcattccctgcccccaatttcccagactagatttcaagctaattttctttttctgaagcctctaacaaatgatctagttcagaaggaagcaaaatcccttaatctatgtgcaccgttgggaccaatgccttaattaaagaatttaaaaaagttgtaatagagaatatttttggcattcctctcaatgttgtgtgttttttttttttgtgtgctggagggaggggatttaattttaattttaaaatgtttaggaaatttatacaaagaaactttttaataaagtatattgaaagtttaaaaaaaaaaaaaaaa

SEQ ID NO: 89 - DNA, 2133 bp, Homo sapiens
cgggagagcgcgctctgcctgccgcctgcctgcctgccactgagggttcccagcaccatgagggcctggatcttctttctcctttgcctggccgggagggccttggcagcccctcagcaagaagccctgcctgatgagacagaggtggtggaagaaactgtggcagaggtgactgaggtatctgtgggagctaatcctgtccaggtggaagtaggagaatttgatgatggtgcagaggaaaccgaagaggaggtggtggcggaaaatccctgccagaaccaccactgcaaacacggcaaggtgtgcgagctggatgagaacaacacccccatgtgcgtgtgccaggaccccaccagctgcccagcccccattggcgagtttgagaaggtgtgcagcaatgacaacaagaccttcgactcttcctgccacttctttgccacaaagtgcaccctggagggcaccaagaagggccacaagctccacctggactacatcgggccttgcaaatacatccccccttgcctggactctgagctgaccgaattccccctgcgcatgcgggactggctcaagaacgtcctggtcaccctgtatgagagggatgaggacaacaaccttctgactgagaagcagaagctgcgggtgaagaagatccatgagaatgagaagcgcctggaggcaggagaccaccccgtggagctgctggcccgggacttcgagaagaactataacatgtacatcttccctgtacactggcagttcggccagctggaccagcaccccattgacgggtacctctcccacaccgagctggctccactgcgtgctcccctcatccccatggagcattgcaccacccgctttttcgagacctgtgacctggacaatgacaagtacatcgccctggatgagtgggccggctgcttcggcatcaagcagaaggatatcgacaaggatcttgtgatctaaatccactccttccacagtaccggattctctctttaaccctccccttcgtgtttcccccaatgtttaaaatgtttggatggtttgttgttctgcctggagacaaggtgctaacatagatttaagtgaatacattaacggtgctaaaaatgaaaattctaacccaagacatgacattcttagctgtaacttaactattaaggccttttccacacgcattaatagtcccatttttctcttgccatttgtagctttgcccattgtcttattggcacatgggtggacacggatctgctgggctctgccttaaacacacattgcagcttcaacttttctctttagtgttctgtttgaaactaatacttaccgagtcagactttgtgttcatttcatttcagggtcttggctgcctgtgggcttccccaggtggcctggaggtgggcaaagggaagtaacagacacacgatgttgtcaaggatggttttgggactagaggctcagtggtgggagagatccctgcagaatccaccaaccagaacgtggtttgcctgaggctgtaactgagagaaagattctggggctgtcttatgaaaatatagacattctcacataagcccagttcatcaccatttcctcctttacctttcagtgcagtttcttttcacattaggctgttggttcaaacttttgggagcacggactgtcagttctctgggaagtggtcagcgcatcctgcagggcttctcctcctctgtcttttggagaaccagggctcttctcaggggctctagggactgccaggctgtttcagccaggaaggccaaaatcaagagtgagatgtagaaagttgtaaaatagaaaaagtggagttggtgaatcggttgttctttcctcacatttggatgattgtcataaggtttttagcatgttcctccttttcttcaccctcccctttgttcttctattaatcaagagaaacttcaaagttaatgggatggtcggatctcacaggctgagaactcgttcacctccaagcatttcatgaaaaagctgcttcttattaatcatacaaactctcaccatgatgtgaagagtttcacaaatctttcaaaataaaaagtaatgacttagaaactgaaaaaaaaaaaaaaaaaaaaaaaaaaaaaa

SEQ ID NO: 90 - DNA, 2691 bp, Homo sapiens; identical to SEQ ID NO: 8

SEQ ID NO: 91 - DNA, 8027 bp, Homo sapiens
acgcccgcgccggctgtgctgcacagggggaggagagggaaccccaggcgcgagcgggaagaggggacctgcagccacaacttctctggtcctctgcatcccttctgtccctccacccgtccccttccccaccctctggcccccaccttcttggaggcgacaacccccgggaggcattagaagggatttttcccgcagttgcgaagggaagcaaacttggtggcaacttgcctcccggtgcgggcgtctctcccccaccgtctcaacatgcttaggggtccggggcccgggctgctgctgctggccgtccagtgcctggggacagcggtgccctccacgggagcctcgaagagcaagaggcaggctcagcaaatggttcagccccagtccccggtggctgtcagtcaaagcaagcccggttgttatgacaatggaaaacactatcagataaatcaacagtgggagcggacctacctaggcaatgcgttggtttgtacttgttatggaggaagccgaggttttaactgcgagagtaaacctgaagctgaagagacttgctttgacaagtacactgggaacacttaccgagtgggtgacacttatgagcgtcctaaagactccatgatctgggactgtacctgcatcggggctgggcgagggagaataagctgtaccatcgcaaaccgctgccatgaagggggtcagtcctacaagattggtgacacctggaggagaccacatgagactggtggttacatgttagagtgtgtgtgtcttggtaatggaaaaggagaatggacctgcaagcccatagctgagaagtgttttgatcatgctgctgggacttcctatgtggtcggagaaacgtgggagaagccctaccaaggctggatgatggtagattgtacttgcctgggagaaggcagcggacgcatcacttgcacttctagaaatagatgcaacgatcaggacacaaggacatcctatagaattggagacacctggagcaagaaggataatcgaggaaacctgctccagtgcatctgcacaggcaacggccgaggagagtggaagtgtgagaggcacacctctgtgcagaccacatcgagcggatctggccccttcaccgatgttcgtgcagctgtttaccaaccgcagcctcacccccagcctcctccctatggccactgtgtcacagacagtggtgtggtctactctgtggggatgcagtggctgaagacacaaggaaataagcaaatgctttgcacgtgcctgggcaacggagtcagctgccaagagacagctgtaacccagacttacggtggcaactcaaatggagagccatgtgtcttaccattcacctacaatggcaggacgttctactcctgcaccacggaagggcgacaggacggacatctttggtgcagcacaacttcgaattatgagcaggaccagaaatactctttctgcacagaccacactgttttggttcagactcgaggaggaaattccaatggtgccttgtgccacttccccttcctatacaacaaccacaattacactgattgcacttctgagggcagaagagacaacatgaagtggtgtgggaccacacagaactatgatgccgaccagaagtttgggttctgccccatggctgcccacgaggaaatctgcacaaccaatgaaggggtcatgtaccgcattggagatcagtgggataagcagcatgacatgggtcacatgatgaggtgcacgtgtgttgggaatggtcgtggggaatggacatgcattgcctactcgcagcttcgagatcagtgcattgttgatgacatcacttacaatgtgaacgacacattccacaagcgtcatgaagaggggcacatgctgaactgtacatgcttcggtcagggtcggggcaggtggaagtgtgatcccgtcgaccaatgccaggattcagagactgggacgttttatcaaattggagattcatgggagaagtatgtgcatggtgtcagataccagtgctactgctatggccgtggcattggggagtggcattgccaacctttacagacctatccaagctcaagtggtcctgtcgaagtatttatcactgagactccgagtcagcccaactcccaccccatccagtggaatgcaccacagccatctcacatttccaagtacattctcaggtggagacctaaaaattctgtaggccgttggaaggaagctaccataccaggccacttaaactcctacaccatcaaaggcctgaagcctggtgtggtatacgagggccagctcatcagcatccagcagtacggccaccaagaagtgactcgctttgacttcaccaccaccagcaccagcacacctgtgaccagcaacaccgtgacaggagagacgactcccttttctcctcttgtggccacttctgaatctgtgaccgaaatcacagccagtagctttgtggtctcctgggtctcagcttccgacaccgtgtcgggattccgggtggaatatgagctgagtgaggagggagatgagccacagtacctggatcttccaagcacagccacttctgtgaacatccctgacctgcttcctggccgaaaatacattgtaaatgtctatcagatatctgaggatggggagcagagtttgatcctgtctacttcacaaacaacagcgcctgatgcccctcctgacccgactgtggaccaagttgatgacacctcaattgttgttcgctggagcagaccccaggctcccatcacagggtacagaatagtctattcgccatcagtagaaggtagcagcacagaactcaaccttcctgaaactgcaaactccgtcaccctcagtgacttgcaacctggtgttcagtataacatcactatctatgctgtggaagaaaatcaagaaagtacacctgttgtcattcaacaagaaaccactggcaccccacgctcagatacagtgccctctcccagggacctgcagtttgtggaagtgacagacgtgaaggtcaccatcatgtggacaccgcctgagagtgcagtgaccggctaccgtgtggatgtgatccccgtcaacctgcctggcgagcacgggcagaggctgcccatcagcaggaacacctttgcagaagtcaccgggctgtcccctggggtcacctattacttcaaagtctttgcagtgagccatgggagggagagcaagcctctgactgctcaacagacaaccaaactggatgctcccactaacctccagtttgtcaatgaaactgattctactgtcctggtgagatggactccacctcgggcccagataacaggataccgactgaccgtgggccttacccgaagaggccagcccaggcagtacaatgtgggtccctctgtctccaagtaccccctgaggaatctgcagcctgcatctgagtacaccgtatccctcgtggccataaagggcaaccaagagagccccaaagccactggagtctttaccacactgcagcctgggagctctattccaccttacaacaccgaggtgactgagaccaccatcgtgatcacatggacgcctgctccaagaattggttttaagctgggtgtacgaccaagccagggaggagaggcaccacgagaagtgacttcagactcaggaagcatcgttgtgtccggcttgactccaggagtagaatacgtctacaccatccaagtcctgagagatggacaggaaagagatgcgccaattgtaaacaaagtggtgacaccattgtctccaccaacaaacttgcatctggaggcaaaccctgacactggagtgctcacagtctcctgggagaggagcaccaccccagacattactggttatagaattaccacaacccctacaaacggccagcagggaaattctttggaagaagtggtccatgctgatcagagctcctgcacttttgataacctgagtcccggcctggagtacaatgtcagtgtttacactgtcaaggatgacaaggaaagtgtccctatctctgataccatcatcccagctgttcctcctcccactgacctgcgattcaccaacattggtccagacaccatgcgtgtcacctgggctccacccccatccattgatttaaccaacttcctggtgcgttactcacctgtgaaaaatgaggaagatgttgcagagttgtcaatttctccttcagacaatgcagtggtcttaacaaatctcctgcctggtacagaatatgtagtgagtgtctccagtgtctacgaacaacatgagagcacacctcttagaggaagacagaaaacaggtcttgattccccaactggcattgacttttctgatattactgccaactcttttactgtgcactggattgctcctcgagccaccatcactggctacaggatccgccatcatcccgagcacttcagtgggagacctcgagaagatcgggtgccccactctcggaattccatcaccctcaccaacctcactccaggcacagagtatgtggtcagcatcgttgctcttaatggcagagaggaaagtcccttattgattggccaacaatcaacagtttctgatgttccgagggacctggaagttgttgctgcgacccccaccagcctactgatcagctgggatgctcctgctgtcacagtgagatattacaggatcacttacggagaaacaggaggaaatagccctgtccaggagttcactgtgcctgggagcaagtctacagctaccatcagcggccttaaacctggagttgattataccatcactgtgtatgctgtcactggccgtggagacagccccgcaagcagcaagccaatttccattaattaccgaacagaaattgacaaaccatcccagatgcaagtgaccgatgttcaggacaacagcattagtgtcaagtggctgccttcaagttcccctgttactggttacagagtaaccaccactcccaaaaatggaccaggaccaacaaaaactaaaactgcaggtccagatcaaacagaaatgactattgaaggcttgcagcccacagtggagtatgtggttagtgtctatgctcagaatccaagcggagagagtcagcctctggttcagactgcagtaaccaacattgatcgccctaaaggactggcattcactgatgtggatgtcgattccatcaaaattgcttgggaaagcccacaggggcaagtttccaggtacagggtgacctactcgagccctgaggatggaatccatgagctattccctgcacctgatggtgaagaagacactgcagagctgcaaggcctcagaccgggttctgagtacacagtcagtgtggttgccttgcacgatgatatggagagccagcccctgattggaacccagtccacagctattcctgcaccaactgacctgaagttcactcaggtcacacccacaagcctgagcgcccagtggacaccacccaatgttcagctcactggatatcgagtgcgggtgacccccaaggagaagaccggaccaatgaaagaaatcaaccttgctcctgacagctcatccgtggttgtatcaggacttatggtggccaccaaatatgaagtgagtgtctatgctcttaaggacactttgacaagcagaccagctcagggtgttgtcaccactctggagaatgtcagcccaccaagaagggctcgtgtgacagatgctactgagaccaccatcaccattagctggagaaccaagactgagacgatcactggcttccaagttgatgccgttccagccaatggccagactccaatccagagaaccatcaagccagatgtcagaagctacaccatcacaggtttacaaccaggcactgactacaagatctacctgtacaccttgaatgacaatgctcggagctcccctgtggtcatcgacgcctccactgccattgatgcaccatccaacctgcgtttcctggccaccacacccaattccttgctggtatcatggcagccgccacgtgccaggattaccggctacatcatcaagtatgagaagcctgggtctcctcccagagaagtggtccctcggccccgccctggtgtcacagaggctactattactggcctggaaccgggaaccgaatatacaatttatgtcattgccctgaagaataatcagaagagcgagcccctgattggaaggaaaaagacagacgagcttccccaactggtaacccttccacaccccaatcttcatggaccagagatcttggatgttccttccacagttcaaaagacccctttcgtcacccaccctgggtatgacactggaaatggtattcagcttcctggcacttctggtcagcaacccagtgttgggcaacaaatgatctttgaggaacatggttttaggcggaccacaccgcccacaacggccacccccataaggcataggccaagaccatacccgccgaatgtaggacaagaagctctctctcagacaaccatctcatgggccccattccaggacacttctgagtacatcatttcatgtcatcctgttggcactgatgaagaacccttacagttcagggttcctggaacttctaccagtgccactctgacaggcctcaccagaggtgccacctacaacatcatagtggaggcactgaaagaccagcagaggcataaggttcgggaagaggttgttaccgtgggcaactctgtcaacgaaggcttgaaccaacctacggatgactcgtgctttgacccctacacagtttcccattatgccgttggagatgagtgggaacgaatgtctgaatcaggctttaaactgttgtgccagtgcttaggctttggaagtggtcatttcagatgtgattcatctagatggtgccatgacaatggtgtgaactacaagattggagagaagtgggaccgtcagggagaaaatggccagatgatgagctgcacatgtcttgggaacggaaaaggagaattcaagtgtgaccctcatgaggcaacgtgttacgatgatgggaagacataccacgtaggagaacagtggcagaaggaatatctcggtgccatttgctcctgcacatgctttggaggccagcggggctggcgctgtgacaactgccgcagacctgggggtgaacccagtcccgaaggcactactggccagtcctacaaccagtattctcagagataccatcagagaacaaacactaatgttaattgcccaattgagtgcttcatgcctttagatgtacaggctgacagagaagattcccgagagtaaatcatctttccaatccagaggaacaagcatgtctctctgccaagatccatctaaactggagtgatgttagcagacccagcttagagttcttctttctttcttaagccctttgctctggaggaagttctccagcttcagctcaactcacagcttctccaagcatcaccctgggagtttcctgagggttttctcataaatgagggctgcacattgcctgttctgcttcgaagtattcaataccgctcagtattttaaatgaagtgattctaagatttggtttgggatcaataggaaagcatatgcagccaaccaagatgcaaatgttttgaaatgatatgaccaaaattttaagtaggaaagtcacccaaacacttctgctttcacttaagtgtctggcccgcaatactgtaggaacaagcatgatcttgttactgtgatattttaaatatccacagtactcactttttccaaatgatcctagtaattgcctagaaatatctttctcttacctgttatttatcaatttttcccagtatttttatacggaaaaaattgtattgaaaacacttagtatgcagttgataagaggaatttggtataattatggtgggtgattattttttatactgtatgtgccaaagctttactactgtggaaagacaactgttttaataaaagatttacattccaca

SEQ ID NO: 92 - DNA, 5084 bp, Homo sapiens
agcaccacggcagcaggaggtttcggctaagttggaggtactggccacgactgcatgcccgcgcccgccaggtgatacctccgccggtgacccaggggctctgcgacacaaggagtctgcatgtctaagtgctagacatgctcagctttgtggatacgcggactttgttgctgcttgcagtaaccttatgcctagcaacatgccaatctttacaagaggaaactgtaagaaagggcccagccggagatagaggaccacgtggagaaaggggtccaccaggccccccaggcagagatggtgaagatggtcccacaggccctcctggtccacctggtcctcctggcccccctggtctcggtgggaactttgctgctcagtatgatggaaaaggagttggacttggccctggaccaatgggcttaatgggacctagaggcccacctggtgcagctggagccccaggccctcaaggtttccaaggacctgctggtgagcctggtgaacctggtcaaactggtcctgcaggtgctcgtggtccagctggccctcctggcaaggctggtgaagatggtcaccctggaaaacccggacgacctggtgagagaggagttgttggaccacagggtgctcgtggtttccctggaactcctggacttcctggcttcaaaggcattaggggacacaatggtctggatggattgaagggacagcccggtgctcctggtgtgaagggtgaacctggtgcccctggtgaaaatggaactccaggtcaaacaggagcccgtgggcttcctggtgagagaggacgtgttggtgcccctggcccagctggtgcccgtggcagtgatggaagtgtgggtcccgtgggtcctgctggtcccattgggtctgctggccctccaggcttcccaggtgcccctggccccaagggtgaaattggagctgttggtaacgctggtcctgctggtcccgccggtccccgtggtgaagtgggtcttccaggcctctccggccccgttggacctcctggtaatcctggagcaaacggccttactggtgccaagggtgctgctggccttcccggcgttgctggggctcccggcctccctggaccccgcggtattcctggccctgttggtgctgccggtgctactggtgccagaggacttgttggtgagcctggtccagctggctccaaaggagagagcggtaacaagggtgagcccggctctgctgggccccaaggtcctcctggtcccagtggtgaagaaggaaagagaggccctaatggggaagctggatctgccggccctccaggacctcctgggctgagaggtagtcctggttctcgtggtcttcctggagctgatggcagagctggcgtcatgggccctcctggtagtcgtggtgcaagtggccctgctggagtccgaggacctaatggagatgctggtcgccctggggagcctggtctcatgggacccagaggtcttcctggttcccctggaaatatcggccccgctggaaaagaaggtcctgtcggcctccctggcatcgacggcaggcctggcccaattggcccagctggagcaagaggagagcctggcaacattggattccctggacccaaaggccccactggtgatcctggcaaaaacggtgataaaggtcatgctggtcttgctggtgctcggggtgctccaggtcctgatggaaacaatggtgctcagggacctcctggaccacagggtgttcaaggtggaaaaggtgaacagggtcccgctggtcctccaggcttccagggtctgcctggcccctcaggtcccgctggtgaagttggcaaaccaggagaaaggggtctccatggtgagtttggtctccctggtcctgctggtccaagaggggaacgcggtcccccaggtgagagtggtgctgccggtcctactggtcctattggaagccgaggtccttctggacccccagggcctgatggaaacaagggtgaacctggtgtggttggtgctgtgggcactgctggtccatctggtcctagtggactcccaggagagaggggtgctgctggcatacctggaggcaagggagaaaagggtgaacctggtctcagaggtgaaattggtaaccctggcagagatggtgctcgtggtgctcatggtgctgtaggtgcccctggtcctgctggagccacaggtgaccggggcgaagctggggctgctggtcctgctggtcctgctggtcctcggggaagccctggtgaacgtggcgaggtcggtcctgctggccccaacggatttgctggtccggctggtgctgctggtcaaccgggtgctaaaggagaaagaggagccaaagggcctaagggtgaaaacggtgttgttggtcccacaggccccgttggagctgctggcccagctggtccaaatggtccccccggtcctgctggaagtcgtggtgatggaggcccccctggtatgactggtttccctggtgctgctggacggactggtcccccaggaccctctggtatttctggccctcctggtccccctggtcctgctgggaaagaagggcttcgtggtcctcgtggtgaccaaggtccagttggccgaactggagaagtaggtgcagttggtccccctggcttcgctggtgagaagggtccctctggagaggctggtactgctggacctcctggcactccaggtcctcagggtcttcttggtgctcctggtattctgggtctccctggctcgagaggtgaacgtggtctacctggtgttgctggtgctgtgggtgaacctggtcctcttggcattgccggccctcctggggcccgtggtcctcctggtgctgtgggtagtcctggagtcaacggtgctcctggtgaagctggtcgtgatggcaaccctgggaacgatggtcccccaggtcgcgatggtcaacccggacacaagggagagcgcggttaccctggcaatattggtcccgttggtgctgcaggtgcacctggtcctcatggccccgtgggtcctgctggcaaacatggaaaccgtggtgaaactggtccttctggtcctgttggtcctgctggtgctgttggcccaagaggtcctagtggcccacaaggcattcgtggcgataagggagagcccggtgaaaaggggcccagaggtcttcctggcttaaagggacacaatggattgcaaggtctgcctggtatcgctggtcaccatggtgatcaaggtgctcctggctccgtgggtcctgctggtcctaggggccctgctggtccttctggccctgctggaaaagatggtcgcactggacatcctggtacggttggacctgctggcattcgaggccctcagggtcaccaaggccctgctggcccccctggtccccctggccctcctggacctccaggtgtaagcggtggtggttatgactttggttacgatggagacttctacagggctgaccagcctcgctcagcaccttctctcagacccaaggactatgaagttgatgctactctgaagtctctcaacaaccagattgagacccttcttactcctgaaggctctagaaagaacccagctcgcacatgccgtgacttgagactcagccacccagagtggagcagtggttactactggattgaccctaaccaaggatgcactatggatgctatcaaagtatactgtgatttctctactggcgaaacctgtatccgggcccaacctgaaaacatcccagccaagaactggtataggagctccaaggacaagaaacacgtctggctaggagaaactatcaatgctggcagccagtttgaatataatgtagaaggagtgacttccaaggaaatggctacccaacttgccttcatgcgcctgctggccaactatgcctctcagaacatcacctaccactgcaagaacagcattgcatacatggatgaggagactggcaacctgaaaaaggctgtcattctacagggctctaatgatgttgaacttgttgctgagggcaacagcaggttcacttacactgttcttgtagatggctgctctaaaaagacaaatgaatggggaaagacaatcattgaatacaaaacaaataagccatcacgcctgcccttccttgatattgcacctttggacatcggtggtgctgaccatgaattctttgtggacattggcccagtctgtttcaaataaatgaactcaatctaaattaaaaaagaaagaaatttgaaaaaactttctctttgccatttcttcttcttcttttttaactgaaagctgaatccttccatttcttctgcacatctacttgcttaaattgtgggcaaaagagaaaaagaaggattgatcagagcattgtgcaatacagtttcattaactccttcccccgctcccccaaaaatttgaatttttttttcaacactcttacacctgttatggaaaatgtcaacctttgtaagaaaaccaaaataaaaattgaaaaataaaaaccataaacatttgcaccacttgtggcttttgaatatcttccacagagggaagtttaaaacccaaacttccaaaggtttaaactacctcaaaacactttcccatgagtgtgatccacattgttaggtgctgacctagacagagatgaactgaggtccttgttttgttttgttcataatacaaaggtgctaattaatagtatttcagatacttgaagaatgttgatggtgctagaagaatttgagaagaaatactcctgtattgagttgtatcgtgtggtgtattttttaaaaaatttgatttagcattcatattttccatcttattcccaattaaaagtatgcagattatttgcccaaagttgtcctcttcttcagattcagcatttgttctttgccagtctcattttcatcttcttccatggttccacagaagctttgtttcttgggcaagcagaaaaattaaattgtacctattttgtatatgtgagatgtttaaataaattgtgaaaaaaatgaaataaagcatgtttggttttccaaaagaacatat

SEQ ID NO: 93 - DNA, 595 bp, Homo sapiens
gggcaaggctgggccgggaagggcgtgggttgaggagaggctccagacccgcacgccgcgcgcacagagctctcagcgccgctcccagccacagcctcccgcgcctcgctcagctccaacatggcaaaaatctccagccctacagagactgagcggtgcatcgagtccctgattgctgtcttccagaagtatgctggaaaggatggttataactacactctctccaagacagagttcctaagcttcatgaatacagaactagctgccttcacaaagaaccagaaggaccctggtgtccttgaccgcatgatgaagaaactggacaccaacagtgatggtcagctagatttctcagaatttcttaatctgattggtggcctagctatggcttgccatgactccttcctcaaggctgtcccttcccagaagcggacctgaggaccccttggccctggccttcaaacccaccccctttccttccagcctttctgtcatcatctccacagcccacccatcccctgagcacactaaccacctcatgcaggccccacctgccaatagtaataaagcaatgtcacttttttaaaacatgaaa

SEQ ID NO: 94 - DNA, 2116 bp, Homo sapiens
gtgaaggccggcgcgctcgccggccgaggtgggatcccgaggcctctccagtccgccgagggcgcaccaccggcccgtctcgcccgccgcgccggggaggtggagcacgagcgcacgtgttaggacccgaaagatggtgaactatgcctgggcagggcgaagccagaggaaactctggtggaggtccgtagcggtcctgacgtgcaaatcggtcgtccgacctgggtataggggcgggctccaggcgaggcggtcgacgctcctgaaaacttgcgcgcgcgctcgcgccactgcgcccggagcgatgaagatggtcgcgccctggacgcggttctactccaacagctgctgcttgtgctgccatgtccgcaccggcaccatcctgctcggcgtctggtatctgatcatcaatgctgtggtactgttgattttattgagtgccctggctgatccggatcagtataacttttcaagttctgaactgggaggtgactttgagttcatggatgatgccaacatgtgcattgccattgcgatttctcttctcatgatcctgatatgtgctatggctacttacggagcgtacaagcaacgcgcagcctggatcatcccattcttctgttaccagatctttgactttgccctgaacatgttggttgcaatcactgtgcttatttatccaaactccattcaggaatacatacggcaactgcctcctaattttccctacagagatgatgtcatgtcagtgaatcctacctgtttggtccttattattcttctgtttattagcattatcttgacttttaagggttacttgattagctgtgtttggaactgctaccgatacatcaatggtaggaactcctctgatgtcctggtttatgttaccagcaatgacactacggtgctgctacccccgtatgatgatgccactgtgaatggtgctgccaaggagccaccgccaccttacgtgtctgcctaagccttcaagtgggcggagctgagggcagcagcttgactttgcagacatctgagcaatagttctgttatttcacttttgccatgagcctctctgagcttgtttgttgctgaaatgctactttttaaaatttagatgttagattgaaaactgtagttttcaacatatgctttgctagaacactgtgatagattaactgtagaattcttcctgtacgattggggatataatgggcttcactaaccttccctaggcattgaaacttcccccaaatctgatggacctagaagtctgcttttgtacctgctgggccccaaagttgggcatttttctctctgttccctctcttttgaaaatgtaaaataaaaccaaaaatagacaactttttcttcagccattccagcatagagaacaaaaccttatggaaacaggaatgtcaattgtgtaatcattgttctaattaggtaaatagaagtccttatgtatgtgttacaagaatttcccccacaacatcctttatgactgaagttcaatgacagtttgtgtttgggtggtaaaggattttctccatggcctgaattaagaccattagaaagcaccaggccgtgggagcagtgaccatctgctgactgttcttgtggatcttgtgtccagggacatggggtgacatgcctcgtatgtgttagagggtggaatggatgtgtttggcgctgcatgggatctggtgcccctcttctcctggattcacatccccacccagggcccgcttttactaagtgttctgccctagattggttcaaggaggtcatccaactgactttatcaagtggaattgggatatatttgatatacttctgcctaacaacatggaaaagggttttcttttccctgcaagctacatcctactgctttgaacttccaagtatgtctagtcaccttttaaaatgtaaacattttcagaaaaatgaggattgccttccttgtatgcgctttttaccttgactacctgaattgcaagggatttttatatattcatatgttacaaagtcagcaactctcctgttggttcattattgaatgtgctgtaaattaagttgtttgcaattaaaacaaggtttgcccacaaaaaaaaaa

SEQ ID NO: 95 - DNA, 3583 bp, Homo sapiens
cgcggacccggccggcccaggcccgcgcccgccgcggccctgagaggccccggcaggtcccggcccggcggcggcagccatggccggggggccgggcccgggggagcccgcagcccccggcgcccagcacttcttgtacgaggtgccgccctgggtcatgtgccgcttctacaaagtgatggacgccctggagcccgccgactggtgccagttcgccgccctgatcgtgcgcgaccagaccgagctgcggctgtgcgagcgctccgggcagcgcacggccagcgtcctgtggccctggatcaaccgcaacgcccgtgtggccgacctcgtgcacatcctcacgcacctgcagctgctccgtgcgcgggacatcatcacagcctggcaccctcccgccccgcttccgtccccaggcaccactgccccgaggcccagcagcatccctgcacccgccgaggccgaggcctggagcccccggaagttgccatcctcagcctccaccttcctctccccagcttttccaggctcccagacccattcagggcctgagctcggcctggttccaagccctgcttccctgtggcctccaccgccatctccagccccttcttctaccaagccaggcccagagagctcagtgtccctcctgcagggagcccgcccctctccgttttgctggcccctctgtgagatttcccggggcacccacaacttctcggaggagctcaagatcggggagggtggctttgggtgcgtgtaccgggcggtgatgaggaacacggtgtatgctgtgaagaggctgaaggagaacgctgacctggagtggactgcagtgaagcagagcttcctgaccgaggtggagcagctgtccaggtttcgtcacccaaacattgtggactttgctggctactgtgctcagaacggcttctactgcctggtgtacggcttcctgcccaacggctccctggaggaccgtctccactgccagacccaggcctgcccacctctctcctggcctcagcgactggacatccttctgggtacagcccgggcaattcagtttctacatcaggacagccccagcctcatccatggagacatcaagagttccaacgtccttctggatgagaggctgacacccaagctgggagactttggcctggcccggttcagccgctttgccgggtccagccccagccagagcagcatggtggcccggacacagacagtgcggggcaccctggcctacctgcccgaggagtacatcaagacgggaaggctggctgtggacacggacaccttcagctttggggtggtagtgctagagaccttggctggtcagagggctgtgaagacgcacggtgccaggaccaagtatctgaaagacctggtggaagaggaggctgaggaggctggagtggctttgagaagcacccagagcacactgcaagcaggtctggctgcagatgcctgggctgctcccatcgccatgcagatctacaagaagcacctggaccccaggcccgggccctgcccacctgagctgggcctgggcctgggccagctggcctgctgctgcctgcaccgccgggccaaaaggaggcctcctatgacccaggtgtacgagaggctagagaagctgcaggcagtggtggcgggggtgcccgggcatttggaggccgccagctgcatccccccttccccgcaggagaactcctacgtgtccagcactggcagagcccacagtggggctgctccatggcagcccctggcagcgccatcaggagccagtgcccaggcagcagagcagctgcagagaggccccaaccagcccgtggagagtgacgagagcctaggcggcctctctgctgccctgcgctcctggcacttgactccaagctgccctctggacccagcacccctcagggaggccggctgtcctcagggggacacggcaggagaatcgagctgggggagtggcccaggatcccggcccacagccgtggaaggactggcccttggcagctctgcatcatcgtcgtcagagccaccgcagattatcatcaaccctgcccgacagaagatggtccagaagctggccctgtacgaggatggggccctggacagcctgcagctgctgtcgtccagctccctcccaggcttgggcctggaacaggacaggcaggggcccgaagaaagtgatgaatttcagagctgatgtgttcacctgggcagatcccccaaatccggaagtcaaagttctcatggtcagaagttctcatggtgcacgagtcctcagcactctgccggcagtgggggtgggggcccatgcccgcgggggagagaaggaggtggccctgctgttctaggctctgtgggcataggcaggcagagtggaaccctgcctccatgccagcatctgggggcaaggaaggctggcatcatccagtgaggaggctggcgcatgttgggaggctgctggctgcacagacccgtgaggggaggagaggggctgctgtgcaggggtgtggagtagggagctggctcccctgagagccatgcagggcgtctgcagcccaggcctctggcagcagctctttgcccatctctttggacagtggccaccctgcacaatggggccgacgaggcctagggccctcctacctgcttacaatttggaaaagtgtggccgggtgcggtggctcacgcctgtaatcccagcactttgggaggccaaggcaggaggatcgctggagcccagtaggtcaagaccagccagggcaacatgatgagaccctgtctctgccaaaaaattttttaaactattagcctggcgtggtagcgcacgcctgtggtcccagctgctggggaggctgaagtaggaggatcatttatgcttgggaggtcgaggctgcagtgagtcatgattgtatgactgcactccagcctgggtgacagagcaagaccctgtttcaaaaagaaaaaccctgggaaaagtgaagtatggctgtaagtctcatggttcagtcctagcaagaagcgagaattctgagatcctccagaaagtcgagcagcacccacctccaacctcgggccagtgtcttcaggctttactggggacctgcgagctggcctaatgtggtggcctgcaagccaggccatccctgggcgccacagacgagctccgagccaggtcaggcttcggaggccacaagctcagcctcaggcccaggcactgattgtggcagaggggccactacccaaggtctagctaggcccaagacctagttacccagacagtgagaagcccctggaaggcagaaaagttgggagcatggcagacagggaagggaaacattttcagggaaaagacatgtatcacatgtcttcagaagcaagtcaggtttcatgtaaccgagtgtcctcttgcgtgtccaaaagtagcccagggctgtagcacaggcttcacagtgattttgtgttcagccgtgagtcacactacatgcccccgtgaagctgggcattggtgacgtccaggttgtccttgagtaataaaaacgtatgttccctaaaaaaaaaaaaa

SEQ ID NO: 96 - DNA, 905 bp, Homo sapiens
caacacaggggcagtctccaggacctccacaccattaacaagatgagccttgtgctcccttgggctctagagaggaagcccctctgagccctcagcccctctttcctccctctcctaaagtaatttgatcctcaggaatttgttctgccctcatctggccctggccagctctgcatttgacaaatgccaggaagaggaaactgttgagaaaacggaactactggggaaagggagggctcactgagaaccatcccggtaacccgaccgccgctggtcaccatgaaccacattgtgcaaaccttctctcctgtcaacagcggccagcctcccaactacgagatgctcaaggaggagcaggaagtggctatgctgggggggccccacaaccctgctcccccgacgtccaccgtgatccacatccgcagcgagacctccgtgcctgaccatgtcgtctggtccctgttcaacaccctcttcatgaacacctgctgcctgggcttcatagcattcgcctactccgtgaagtctagggacaggaagatggttggcgacgtgaccggggcccaggcctatgcctccaccgccaagtgcctgaacatctgggccctgattttgggcatcttcatgaccattctgctcgtcatcatcccagtgttggtcgtccaggcccagcgatagatcaggaggcatcattgaggccaggagctctgcccgtgacctgtatcccacgtactctatcttccattcctcgccctgcccccagaggccaggagctctgcccttgacctgtattccacttactccaccttccattcctcgccctgtccccacagccgagtcctgcatcagccctttatcctcacacgcttttctacaatggcattcaataaagtgtatatgtttct

SEQ ID NO: 97 - DNA, 782 bp, Homo sapiens
aggggccttagcgtgccgcatcgccgagatccagcgcccagagagacaccagagaacccaccatggccccctttgagcccctggcttctggcatcctgttgttgctgtggctgatagcccccagcagggcctgcacctgtgtcccaccccacccacagacggccttctgcaattccgacctcgtcatcagggccaagttcgtggggacaccagaagtcaaccagaccaccttataccagcgttatgagatcaagatgaccaagatgtataaagggttccaagccttaggggatgccgctgacatccggttcgtctacacccccgccatggagagtgtctgcggatacttccacaggtcccacaaccgcagcgaggagtttctcattgctggaaaactgcaggatggactcttgcacatcactacctgcagtttcgtggctccctggaacagcctgagcttagctcagcgccggggcttcaccaagacctacactgttggctgtgaggaatgcacagtgtttccctgtttatccatcccctgcaaactgcagagtggcactcattgcttgtggacggaccagctcctccaaggctctgaaaagggcttccagtcccgtcaccttgcctgcctgcctcgggagccagggctgtgcacctggcagtccctgcggtcccagatagcctgaatcctgcccggagtggaactgaagcctgcacagtgtccaccctgttcccactcccatctttcttccggacaatgaaataaagagttaccacccagc

SEQ ID NO: 98 - DNA, 1124 bp, Homo sapiens
gccgctgccaccgcaccccgccatggagcggccgtcgctgcgcgccctgctcctcggcgccgctgggctgctgctcctgctcctgcccctctcctcttcctcctcttcggacacctgcggcccctgcgagccggcctcctgcccgcccctgcccccgctgggctgcctgctgggcgagacccgcgacgcgtgcggctgctgccctatgtgcgcccgcggcgagggcgagccgtgcgggggtggcggcgccggcagggggtactgcgcgccgggcatggagtgcgtgaagagccgcaagaggcggaagggtaaagccggggcagcagccggcggtccgggtgtaagcggcgtgtgcgtgtgcaagagccgctacccggtgtgcggcagcgacggcaccacctacccgagcggctgccagctgcgcgccgccagccagagggccgagagccgcggggagaaggccatcacccaggtcagcaagggcacctgcgagcaaggtccttccatagtgacgccccccaaggacatctggaatgtcactggtgcccaggtgtacttgagctgtgaggtcatcggaatcccgacacctgtcctcatctggaacaaggtaaaaaggggtcactatggagttcaaaggacagaactcctgcctggtgaccgggacaacctggccattcagacccggggtggcccagaaaagcatgaagtaactggctgggtgctggtatctcctctaagtaaggaagatgctggagaatatgagtgccatgcatccaattcccaaggacaggcttcagcatcagcaaaaattacagtggttgatgccttacatgaaataccagtgaaaaaaggtgaaggtgccgagctataaacctccagaatattattagtctgcatggttaaaagtagtcatggataactacattacctgttcttgcctaataagtttcttttaatccaatccactaacactttagttatattcactggttttacacagagaaatacaaaataaagatcacacatcaagactatctacaaaaatttattatatatttacagaagaaaagcatgcatatcattaaacaaataaaatactttttatcacaaaaaaaaaaaaaaaa

SEQ ID NO: 99 - DNA, 647 bp, Homo sapiens
gctcactgagcaccgtcccagcatccggacaccacagcggcccttcgctccacgcagaaaaccacacttctcataccttcactcaacacttccttccccaaagccagaagatgcacaaggaggaacatgaggtggctgtgctgggggcaccccccagcaccatccttccaaggtccaccgtgattaacatccacagcgagacctccgtgcccgaccatgtcgtctggtccctgttcaacaccctcttcttgaactggtgctgtctgggcttcatagcattcgcctactccgtaaagtctagggacaggaagatggttggcgacgtgaccggggcccaggcctatgcctccaccgccaagtgcctgaacatctgggccctgattctgggcatcctcatgaccattggattcatcctgttactggtattcggctctgtaacagtctaccatattatgttacagataatacaggaaaaacggggttactagtagccgcccatagcctgcaacctttgcactccactgtgcaatgctggccctgcacgctggggctgttgcccctgcccccttggtcctgcccctagatacagcagtttatacccacacacctgtctacagtgtcattcaataaagtgcacgtgcttgtga

SEQ ID NO: 100 - DNA, 5489 bp, Homo sapiens; identical to SEQ ID NO: 10

SEQ ID NO: 101 - DNA, 1722 bp, Homo sapiens
ggggaaaagagctaggaaagagctgcaaagcagtgtgggctttttccctttttttgctccttttcattacccctcctccgttttcacccttctccggacttcgcgtagaacctgcgaatttcgaagaggaggtggcaaagtgggagaaaagaggtgttagggtttggggtttttttgtttttgtttttgttttttaatttcttgatttcaacattttctcccaccctctcggctgcagccaacgcctcttacctgttctgcggcgccgcgcaccgctggcagctgagggttagaaagcggggtgtattttagattttaagcaaaaattttaaagataaatccatttttctctcccacccccaacgccatctccactgcatccgatctcattatttcggtggttgcttgggggtgaacaattttgtggctttttttcccctataattctgacccgctcaggcttgagggtttctccggcctccgctcactgcgtgcacctggcgctgccctgcttcccccaacctgttgcaaggctttaattcttgcaactgggacctgctcgcaggcaccccagccctccacctctctctacatttttgcaagtgtctgggggagggcacctgctctacctgccagaaattttaaaacaaaaacaaaaacaaaaaaatctccgggggccctcttggcccctttatccctgcactctcgctctcctgccccaccccgaggtaaagggggcgactaagagaagatggtgttgctcaccgcggtcctcctgctgctggccgcctatgcggggccggcccagagcctgggctccttcgtgcactgcgagccctgcgacgagaaagccctctccatgtgcccccccagccccctgggctgcgagctggtcaaggagccgggctgcggctgctgcatgacctgcgccctggccgaggggcagtcgtgcggcgtctacaccgagcgctgcgcccaggggctgcgctgcctcccccggcaggacgaggagaagccgctgcacgccctgctgcacggccgcggggtttgcctcaacgaaaagagctaccgcgagcaagtcaagatcgagagagactcccgtgagcacgaggagcccaccacctctgagatggccgaggagacctactcccccaagatcttccggcccaaacacacccgcatctccgagctgaaggctgaagcagtgaagaaggaccgcagaaagaagctgacccagtccaagtttgtcgggggagccgagaacactgcccacccccggatcatctctgcacctgagatgagacaggagtctgagcagggcccctgccgcagacacatggaggcttccctgcaggagctcaaagccagcccacgcatggtgccccgtgctgtgtacctgcccaattgtgaccgcaaaggattctacaagagaaagcagtgcaaaccttcccgtggccgcaagcgtggcatctgctggtgcgtggacaagtacgggatgaagctgccaggcatggagtacgttgacggggactttcagtgccacaccttcgacagcagcaacgttgagtgatgcgtccccccccaacctttccctcaccccctcccacccccagccccgactccagccagcgcctccctccaccccaggacgccactcatttcatctcatttaagggaaaaatatatatctatctatttgaggaaaaaaaaaaaaaaaaaaaa

SEQ ID NO: 102 - DNA, 1200 bp, Homo sapiens
aagatataaaagctccagaaacgttgactgggaccactggagacactgaagaaggcaggggcccttagagtcttggttgccaaacagatttgcagatcaaggagaacccaggagtttcaaagaagcgctagtaaggtctctgagatccttgcactagctacatcctcagggtaggaggaagatggcttccagaagcatgcggctgctcctattgctgagctgcctggccaaaacaggagtcctgggtgatatcatcatgagacccagctgtgctcctggatggttttaccacaagtccaattgctatggttacttcaggaagctgaggaactggtctgatgccgagctcgagtgtcagtcttacggaaacggagcccacctggcatctatcctgagtttaaaggaagccagcaccatagcagagtacataagtggctatcagagaagccagccgatatggattggcctgcacgacccacagaagaggcagcagtggcagtggattgatggggccatgtatctgtacagatcctggtctggcaagtccatgggtgggaacaagcactgtgctgagatgagctccaataacaactttttaacttggagcagcaacgaatgcaacaagcgccaacacttcctgtgcaagtaccgaccatagagcaagaatcaagattctgctaactcctgcacagccccgtcctcttcctttctgctagcctggctaaatctgctcattatttcagaggggaaacctagcaaactaagagtgataagggccctactacactggcttttttaggcttagagacagaaactttagcattggcccagtagtggcttctagctctaaatgtttgccccgccatccctttccacagtatccttcttccctcctcccctgtctctggctgtctcgagcagtctagaagagtgcatctccagcctatgaaacagctgggtctttggccataagaagtaaagatttgaagacagaaggaagaaactcaggagtaagcttctagaccccttcagcttctacacccttctgccctctctccattgcctgcaccccaccccagccactcaactcctgcttgtttttcctttggccataggaaggtttaccagtagaatccttgctaggttgatgtgggccatacattcctttaataaaccattgtgtacataagaaaaaaaaaa

SEQ ID NO: 103 - DNA, 1701 bp, Homo sapiens; identical to SEQ ID NO: 2

SEQ ID NO: 104 - DNA, 2259 bp, Homo sapiens
cagttgcttcagcgtcccggtgtggctgtgccgttggtcctgtgcggtcacttagccaagatgcctgaggaaacccagacccaagaccaaccgatggaggaggaggaggttgagacgttcgcctttcaggcagaaattgcccagttgatgtcattgatcatcaatactttctactcgaacaaagagatctttctgagagagctcatttcaaattcatcagatgcattggacaaaatccggtatgaaagcttgacagatcccagtaaattagactctgggaaagagctgcatattaaccttataccgaacaaacaagatcgaactctcactattgtggatactggaattggaatgaccaaggctgacttgatcaataaccttggtactatcgccaagtctgggaccaaagcgttcatggaagctttgcaggctggtgcagatatctctatgattggccagttcggtgttggtttttattctgcttatttggttgctgagaaagtaactgtgatcaccaaacataacgatgatgagcagtacgcttgggagtcctcagcagggggatcattcacagtgaggacagacacaggtgaacctatgggtcgtggaacaaaagttatcctacacctgaaagaagaccaaactgagtacttggaggaacgaagaataaaggagattgtgaagaaacattctcagtttattggatatcccattactctttttgtggagaaggaacgtgataaagaagtaagcgatgatgaggctgaagaaaaggaagacaaagaagaagaaaaagaaaaagaagagaaagagtcggaagacaaacctgaaattgaagatgttggttctgatgaggaagaagaaaagaaggatggtgacaagaagaagaagaagaagattaaggaaaagtacatcgatcaagaagagctcaacaaaacaaagcccatctggaccagaaatcccgacgatattactaatgaggagtacggagaattctataagagcttgaccaatgactgggaagatcacttggcagtgaagcatttttcagttgaaggacagttggaattcagagcccttctatttgtcccacgacgtgctccttttgatctgtttgaaaacagaaagaaaaagaacaacatcaaattgtatgtacgcagagttttcatcatggataactgtgaggagctaatccctgaatatctgaacttcattagaggggtggtagactcggaggatctccctctaaacatatcccgtgagatgttgcaacaaagcaaaattttgaaagttatcaggaagaatttggtcaaaaaatgcttagaactctttactgaactggcggaagataaagagaactacaagaaattctatgagcagttctctaaaaacataaagcttggaatacacgaagactctcaaaatcggaagaagctttcagagctgttaaggtactacacatctgcctctggtgatgagatggtttctctcaaggactactgcaccagaatgaaggagaaccagaaacatatctattatatcacaggtgagaccaaggaccaggtagctaactcagcctttgtggaacgtcttcggaaacatggcttagaagtgatctatatgattgagcccattgatgagtactgtgtccaacagctgaaggaatttgaggggaagactttagtgtcagtcaccaaagaaggcctggaacttccagaggatgaagaagagaaaaagaagcaggaagagaaaaaaacaaagtttgagaacctctgcaaaatcatgaaagacatattggagaaaaaagttgaaaaggtggttgtgtcaaaccgattggtgacatctccatgctgtattgtcacaagcacatatggctggacagcaaacatggagagaatcatgaaagctcaagccctaagagacaactcaacaatgggttacatggcagcaaagaaacacctggagataaaccctgaccattccattattgagaccttaaggcaaaaggcagaggctgataagaacgacaagtctgtgaaggatctggtcatcttgctttatgaaactgcgctcctgtcttctggcttcagtctggaagatccccagacacatgctaacaggatctacaggatgatcaaacttggtctgggtattgatgaagatgaccctactgctgatgataccagtgctgctgtaactgaagaaatgccaccccttgaaggagatgacgacacatcacgcatggaagaagtagactaa

SEQ ID NO: 105 - DNA, 7080 bp, Homo sapiens
gagctagcgctcaagcagagcccagcgcggtgctatcggacagagcctggcgagcgcaagcggcgcggggagccagcggggctgagcgcggccagggtctgaacccagatttcccagactagctaccactccgcttgcccacgccccgggagctcgcggcgcctggcggtcagcgaccagacgtccggggccgctgcgctcctggcccgcgaggcgtgacactgtctcggctacagacccagagggagcacactgccaggatgggagctgctgggaggcaggacttcctcttcaaggccatgctgaccatcagctggctcactctgacctgcttccctggggccacatccacagtggctgctgggtgccctgaccagagccctgagttgcaaccctggaaccctggccatgaccaagaccaccatgtgcatatcggccagggcaagacactgctgctcacctcttctgccacggtctattccatccacatctcagagggaggcaagctggtcattaaagaccacgacgagccgattgttttgcgaacccggcacatcctgattgacaacggaggagagctgcatgctgggagtgccctctgccctttccagggcaatttcaccatcattttgtatggaagggctgatgaaggtattcagccggatccttactatggtctgaagtacattggggttggtaaaggaggcgctcttgagttgcatggacagaaaaagctctcctggacatttctgaacaagacccttcacccaggtggcatggcagaaggaggctatttttttgaaaggagctggggccaccgtggagttattgttcatgtcatcgaccccaaatcaggcacagtcatccattctgaccggtttgacacctatagatccaagaaagagagtgaacgtctggtccagtatttgaacgcggtgcccgatggcaggatcctttctgttgcagtgaatgatgaaggttctcgaaatctggatgacatggccaggaaggcgatgaccaaattgggaagcaaacacttcctgcaccttggatttagacacccttggagttttctaactgtgaaaggaaatccatcatcttcagtggaagaccatattgaatatcatggacatcgaggctctgctgctgcccgggtattcaaattgttccagacagagcatggcgaatatttcaatgtttctttgtccagtgagtgggttcaagacgtggagtggacggagtggttcgatcatgataaagtatctcagactaaaggtggggagaaaatttcagacctctggaaagctcacccaggaaaaatatgcaatcgtcccattgatatacaggccactacaatggatggagttaacctcagcaccgaggttgtctacaaaaaaggccaggattataggtttgcttgctacgaccggggcagagcctgccggagctaccgtgtacggttcctctgtgggaagcctgtgaggcccaaactcacagtcaccattgacaccaatgtgaacagcaccattctgaacttggaggataatgtacagtcatggaaacctggagataccctggtcattgccagtactgattactccatgtaccaggcagaagagttccaggtgcttccctgcagatcctgcgcccccaaccaggtcaaagtggcagggaaaccaatgtacctgcacatcggggaggagatagacggcgtggacatgcgggcggaggttgggcttctgagccggaacatcatagtgatgggggagatggaggacaaatgctacccctacagaaaccacatctgcaatttctttgacttcgatacctttgggggccacatcaagtttgctctgggatttaaggcagcacacttggagggcacggagctgaagcatatgggacagcagctggtgggtcagtacccgattcacttccacctggccggtgatgtagacgaaaggggaggttatgacccacccacatacatcagggacctctccatccatcatacattctctcgctgcgtcacagtccatggctccaatggcttgttgatcaaggacgttgtgggctataactctttgggccactgcttcttcacggaagatgggccggaggaacgcaacacttttgaccactgtcttggcctccttgtcaagtctggaaccctcctcccctcggaccgtgacagcaagatgtgcaagatgatcacagaggactcctacccggggtacatccccaagcccaggcaagactgcaatgctgtgtccaccttctggatggccaatcccaacaacaacctcatcaactgtgccgctgcaggatctgaggaaactggattttggtttatttttcaccacgtaccaacgggcccctccgtgggaatgtactccccaggttattcagagcacattccactgggaaaattctataacaaccgagcacattccaactaccgggctggcatgatcatagacaacggagtcaaaaccaccgaggcctctgccaaggacaagcggccgttcctctcaatcatctctgccagatacagccctcaccaggacgccgacccgctgaagccccgggagccggccatcatcagacacttcattgcctacaagaaccaggaccacggggcctggctgcgcggcggggatgtgtggctggacagctgccggtttgctgacaatggcattggcctgaccctggccagtggtggaaccttcccgtatgacgacggctccaagcaagagataaagaacagcttgtttgttggcgagagtggcaacgtggggacggaaatgatggacaataggatctggggccctggcggcttggaccatagcggaaggaccctccctataggccagaattttccaattagaggaattcagttatatgatggccccatcaacatccaaaactgcactttccgaaagtttgtggccctggagggccggcacaccagcgccctggccttccgcctgaataatgcctggcagagctgcccccataacaacgtgaccggcattgcctttgaggacgttccgattacttccagagtgttcttcggagagcctgggccctggttcaaccagctggacatggatggggataagacatctgtgttccatgacgtcgacggctccgtgtccgagtaccctggctcctacctcacgaagaatgacaactggctggtccggcacccagactgcatcaatgttcccgactggagaggggccatttgcagtgggtgctatgcacagatgtacattcaagcctacaagaccagtaacctgcgaatgaagatcatcaagaatgacttccccagccaccctctttacctggagggggcgctcaccaggagcacccattaccagcaataccaaccggttgtcaccctgcagaagggctacaccatccactgggaccagacggcccccgccgaactcgccatctggctcatcaacttcaacaagggcgactggatccgagtggggctctgctacccgcgaggcaccacattctccatcctctcggatgttcacaatcgcctgctgaagcaaacgtccaagacgggcgtcttcgtgaggaccttgcagatggacaaagtggagcagagctaccctggcaggagccactactactgggacgaggactcagggctgttgttcctgaagctgaaagctcagaacgagagagagaagtttgctttctgctccatgaaaggctgtgagaggataaagattaaagctctgattccaaagaacgcaggcgtcagtgactgcacagccacagcttaccccaagttcaccgagagggctgtcgtagacgtgccgatgcccaagaagctctttggttctcagctgaaaacaaaggaccatttcttggaggtgaagatggagagttccaagcagcacttcttccacctctggaacgacttcgcttacattgaagtggatgggaagaagtaccccagttcggaggatggcatccaggtggtggtgattgacgggaaccaagggcgcgtggtgagccacacgagcttcaggaactccattctgcaaggcataccatggcagcttttcaactatgtggcgaccatccctgacaattccatagtgcttatggcatcaaagggaagatacgtctccagaggcccatggaccagagtgctggaaaagcttggggcagacaggggtctcaagttgaaagagcaaatggcattcgttggcttcaaaggcagcttccggcccatctgggtgacactggacactgaggatcacaaagccaaaatcttccaagttgtgcccatccctgtggtgaagaagaagaagttgtgaggacagctgccgcccggtgccacctcgtggtagactatgacggtgactcttggcagcagaccagtgggggatggctgggtcccccagcccctgccagcagctgcctgggaaggccgtgtttcagccctgatgggccaagggaaggctatcagagaccctggtgctgccacctgcccctactcaagtgtctacctggagcccctggggcggtgctggccaatgctggaaacattcactttcctgcagcctcttgggtgcttctctcctatctgtgcctcttcagtgggggtttggggaccatatcaggagacctgggttgtgctgacagcaaagatccactttggcaggagccctgacccagctaggaggtagtctggagggctggtcattcacagatccccatggtcttcagcagacaagtgagggtggtaaatgtaggagaaagagccttggccttaaggaaatctttactcctgtaagcaagagccaacctcacaggattaggagctggggtagaactggctatccttggggaagaggcaagccctgcctctggccgtgtccacctttcaggagactttgagtggcaggtttggacttggactagatgactctcaaaggcccttttagttctgagattccagaaatctgctgcatttcacatggtacctggaacccaacagttcatggatatccactgatatccatgatgctgggtgccccagcgcacacgggatggagaggtgagaactaatgcctagcttgaggggtctgcagtccagtagggcaggcagtcaggtccatgtgcactgcaatgccaggtggagaaatcacagagaggtaaaatggaggccagtgccatttcagaggggaggctcaggaaggcttcttgcttacaggaatgaaggctgggggcattttgctggggggagatgaggcagcctctggaatggctcagggattcagccctccctgccgctgcctgctgaagctggtgactacggggtcgccctttgctcacgtctctctggcccactcatgatggagaagtgtggtcagaggggagcaatgggctttgctgcttatgagcacagaggaattcagtccccaggcagccctgcctctgactccaagagggtgaagtccacagaagtgagctcctgccttagggcctcatttgctcttcatccagggaactgagcacagggggcctccaggagaccctagatgtgctcgtactccctcggcctgggatttcagagctggaaatatagaaaatatctagcccaaagccttcattttaacagatggggaaagtgagcccccaagatgggaaagaaccacacagctaagggagggcctggggagccccaccctagcccttgctgccacaccacattgcctcaacaaccggccccagagtgcccaggcactcctgaggtagcttctggaaatggggacaagtcccctcgaaggaaaggaaatgactagagtagaatgacagctagcagatctcttccctcctgctcccagcgcacacaaacccgccctccccttggtgttggcggtccctgtggccttcactttgttcactacctgtcagcccagcctgggtgcacagtagctgcaactccccattggtgctacctggctctcctgtctctgcagctctacaggtgaggcccagcagagggagtagggctcgccatgtttctggtgagccaatttggctgatcttgggtgtctgaacagctattgggtccaccccagtccctttcagctgctgcttaatgccctgctctctccctggcccaccttatagagagcccaaagagctcctgtaagagggagaactctatctgtggtttataatcttgcacgaggcaccagagtctccctgggtcttgtgatgaactacatttatcccctttcctgccccaaccacaaactctttccttcaaagagggcctgcctggctccctccacccaactgcacccatgagactcggtccaagagtccattccccaggtgggagccaactgtcagggaggtctttcccaccaaacatctttcagctgctgggaggtgaccatagggctctgcttttaaagatatggctgcttcaaaggccagagtcacaggaaggacttcttccagggagattagtggtgatggagaggagagttaaaatgacctcatgtccttcttgtccacggttttgttgagttttcactcttctaatgcaagggtctcacactgtgaaccacttaggatgtgatcactttcaggtggccaggaatgttgaatgtctttggctcagttcatttaaaaaagatatctatttgaaagttctcagagttgtacatatgtttcacagtacaggatctgtacataaaagtttctttcctaaaccattcaccaagagccaatatctaggcattttcttggtagcacaaattttcttattgcttagaaaattgtcctccttgttatttctgtttgtaagacttaagtgagttaggtctttaaggaaagcaacgctcctctgaaatgcttgtcttttttctgttgccgaaatagctggtcctttttcgggagttagatgtatagagtgtttgtatgtaaacatttcttgtaggcatcaccatgaacaaagatatattttctatttatttattatatgtgcacttcaagaagtcactgtcagagaaataaagaattgtcttaaatgtc

SEQ ID NO: 106 - DNA, 1973 bp, Homo sapiens
gggatattggagtagcaagaggctgggaagccatcacttaccttgcactgagaaagaagacaaaggccagtatgcacagctttcctccactgctgctgctgctgttctggggtgtggtgtctcacagcttcccagcgactctagaaacacaagagcaagatgtggacttagtccagaaatacctggaaaaatactacaacctgaagaatgatgggaggcaagttgaaaagcggagaaatagtggcccagtggttgaaaaattgaagcaaatgcaggaattctttgggctgaaagtgactgggaaaccagatgctgaaaccctgaaggtgatgaagcagcccagatgtggagtgcctgatgtggctcagtttgtcctcactgaggggaaccctcgctgggagcaaacacatctgacctacaggattgaaaattacacgccagatttgccaagagcagatgtggaccatgccattgagaaagccttccaactctggagtaatgtcacacctctgacattcaccaaggtctctgagggtcaagcagacatcatgatatcttttgtcaggggagatcatcgggacaactctccttttgatggacctggaggaaatcttgctcatgcttttcaaccaggcccaggtattggaggggatgctcattttgatgaagatgaaaggtggaccaacaatttcagagagtacaacttacatcgtgttgcggctcatgaactcggccattctcttggactctcccattctactgatatcggggctttgatgtaccctagctacaccttcagtggtgatgttcagctagctcaggatgacattgatggcatccaagccatatatggacgttcccaaaatcctgtccagcccatcggcccacaaaccccaaaagcgtgtgacagtaagctaacctttgatgctataactacgattcggggagaagtgatgttctttaaagacagattctacatgcgcacaaatcccttctacccggaagttgagctcaatttcatttctgttttctggccacaactgccaaatgggcttgaagctgcttacgaatttgccgacagagatgaagtccggtttttcaaagggaataagtactgggctgttcagggacagaatgtgctacacggataccccaaggacatctacagctcctttggcttccctagaactgtgaagcatatcgatgctgctctttctgaggaaaacactggaaaaacctacttctttgttgctaacaaatactggaggtatgatgaatataaacgatctatggatccaggttatcccaaaatgatagcacatgactttcctggaattggccacaaagttgatgcagttttcatgaaagatggatttttctatttctttcatggaacaagacaatacaaatttgatcctaaaacgaagagaattttgactctccagaaagctaatagctggttcaactgcaggaaaaattgaacattactaatttgaatggaaaacacatggtgtgagtccaaagaaggtgttttcctgaagaactgtctattttctcagtcatttttaacctctagagtcactgatacacagaatataatcttatttatacctcagtttgcatatttttttactatttagaatgtagccctttttgtactgatataatttagttccacaaatggtgggtacaaaaagtcaagtttgtggcttatggattcatataggccagagttgcaaagatcttttccagagtatgcaactctgacgttgatcccagagagcagcttcagtgacaaacatatcctttcaagacagaaagagacaggagacatgagtctttgccggaggaaaagcagctcaagaacacatgtgcagtcactggtgtcaccctggataggcaagggataactcttctaacacaaaataagtgttttatgtttggaataaagtcaaccttgtttctactgtttt

SEQ ID NO: 107 - DNA, 1127 bp, Homo sapiens
accaaatcaaccataggtccaagaacaattgtctctggacggcagctatgcgactcaccgtgctgtgtgctgtgtgcctgctgcctggcagcctggccctgccgctgcctcaggaggcgggaggcatgagtgagctacagtgggaacaggctcaggactatctcaagagattttatctctatgactcagaaacaaaaaatgccaacagtttagaagccaaactcaaggagatgcaaaaattctttggcctacctataactggaatgttaaactcccgcgtcatagaaataatgcagaagcccagatgtggagtgccagatgttgcagaatactcactatttccaaatagcccaaaatggacttccaaagtggtcacctacaggatcgtatcatatactcgagacttaccgcatattacagtggatcgattagtgtcaaaggctttaaacatgtggggcaaagagatccccctgcatttcaggaaagttgtatggggaactgctgacatcatgattggctttgcgcgaggagctcatggggactcctacccatttgatgggccaggaaacacgctggctcatgcctttgcgcctgggacaggtctcggaggagatgctcacttcgatgaggatgaacgctggacggatggtagcagtctagggattaacttcctgtatgctgcaactcatgaacttggccattctttgggtatgggacattcctctgatcctaatgcagtgatgtatccaacctatggaaatggagatccccaaaattttaaactttcccaggatgatattaaaggcattcagaaactatatggaaagagaagtaattcaagaaagaaatagaaacttcaggcagaacatccattcattcattcattggattgtatatcattgttgcacaatcagaattgataagcactgttcctccactccatttagcaattatgtcacccttttttattgcagttggtttttgaatgtctttcactccttttattggttaaactcctttatggtgtgactgtgtcttattccatctatgagctttgtcagtgcgcgtagatgtcaataaatgttacatacacaaataaataaaatgtttattccatggtaaattta

SEQ ID NO: 108 - DNA, 1163 bp, Homo sapiens
agatccagcaggtgcgcgaaaccgcggcgcgccgccctccgccgttatatgaggccccgctccggccccacgcggaacccgcggctccgagccttcgccggcgtcccgacccgaggccggacccgaggccagtcccgccgctgcgcagccgaagccagtgcggggcctgagagggacgcgcgccccggggcccccgccgcgggcaccatgggcgctgcccactccgcgtctgaggaggtgcgggagctcgagggcaagaccggcttctcatcggatcagatcgagcagctccatcggagatttaagcagctgagtggagatcagcctaccattcgcaaggagaacttcaacaatgtcccggacctggagctcaaccccatccgatccaaaattgttcgtgccttcttcgacaacaggaacctgcgcaagggacccagtggcctggctgatgagatcaatttcgaggacttcctgaccatcatgtcctacttccggcccatcgacaccaccatggacgaggaacaggtggagctgtcccggaaggagaagctgagatttctgttccacatgtacgactcggacagcgacggccgcatcactctggaagaatatcgaaatgtaaagtggtcgaggagctgctgtcgggaaaccctcacatctagaaggagtccgctcgctccatcgccgacggggccatgatggaggcggccagcgtgtgcatggggcagatggagcctgatcaggtgtacgaggggatcaccttcgaggacttcctgaagatctggcaggggatcgacattgagaccaagatgcacgtccgcttccttaacatggaaaccatggccctctgccactgacccaccgccacctccgcggagagactgcactttgcaatggggccgcctccccgcgtagctggagcagcccaggcccggcggacagcctcttcctgcagcgccggtacatagccaaggctcgtctgcgcaccttgtgtcttgtagggtatggtatgtgggacttcgctgtttttatctccaataaaaaaaaaaaaaaaaggtttgttaattaaaaaaaaaaaaaaaaagaaaaaaaaaaaaaaaaaaaaaaaaaaaaaagaaaaaaaaaaaaaaaaaaaaaaaaaaaaaaaaaaaaaaaaaaaaaaa

SEQ ID NO: 109 - DNA, 2007 bp, Homo sapiens
agcggagggggaaatcctgagcgcaggccagggttgtttggttttgaggtgtgctgggatgaaaggcaccctggaagtggaaggtaaatgagcaatggaaaaacttcacggcaagattagaaagatacctgagcccaatacccgcctgatgtcgtgggccacacctccgggttaccaggggaagggaggaagcaaactgtcatattgatgtggctctaaacaacaacagtgtgcgaaggcccaggggcactttgggattgaccaagaggaaacacaagttgcacaatgatacaatcttgttggtacaattgtcagagaagggaactcccacagcaaaggccataaaaccatccagggcagtctggggcggctcagttctgcggtgccagggagtggagcagagctcagccccgtcccaaacacagatgggaccatgaactccggacacagcttcagccagaccccctcggcctccttccatggcgccggaggtggctggggccggcccaggagcttccccagggctcccaccgtccatggcggtgcggggggagcccgcatctccctgtccttcaccacgcggagctgcccaccccctggagggtcttggggttctggaagaagcagccccctactaggcggaaatgggaaggccaccatgcagaatctcaacgaccgcctggcctcctacgtggagaaggttcgcgccctggaggaggccaacatgaagctggaaagccgcatcctgaaatggcaccagcagagagatcctggcagtaagaaagattattcacagtatgaggaaaacatcacacacctgcaggagcagatagtggatggtaagatgaccaatgctcagattattcttctcattgacaatgccaggatggcagtggatgacttcaacctcaagtatgaaaatgaacactcctttaagaaagacttggaaattgaagtcgagggcctccgaaggaccttagacaacctgaccattgtcacaacagacctagaacaggaggtggaaggaatgaggaaagagctcattctcatgaagaagcaccatgagcaggaaatggagaagcatcatgtgccaagtgacttcaatgtcaatgtgaaggtggatacgggtcccagggaagatctgattaaggtcctggaggatatgagacaagaatatgagcttataataaagaagaagcatcgagacttggacacttggtataaagaacagtctgcagccatgtcccaggaggcagccagtccagccactgtgcagagcagacaaggtgacatccacgaactgaagcgcacattccaggccctggagattgacctgcagacacagtacagcacgaaatctgctttggaaaacatgttatccgagacccagtctcggtactcctgcaagctccaggacatgcaagagatcatctcccactatgaggaggaactgacgcagctacgccatgaactggagcggcagaacaatgaataccaagtgctgctgggcatcaaaacccacctggagaaggaaatcaccacgtaccgacggctcctggagggagagagtgaagggacacgggaagaatcaaagtcgagcatgaaagtgtttgcaactccaaagatcaaggccataacccaggagaccatcaacggaagattagttctttgtcaagtgaatgaaatccaaaagcacgcatgagaccaatgaaagtttccgcctgttgtaaaatctattttcccccaaggaaagtccttgcacagacaccagtgagtgagttctaaaagatacccttggaattatcagactcagaaacttttattttttttttctgtaactgtctcaccagacttctcataatgctcttaatatattgcacttttctaatcaaagtgcgagtttatgagggtaaagctctactttcctactgcagccttcagattctcatcattttgcatctattttgtagccaataaaactccgcactagcaaaaaaaaaaaaaaaa

SEQ ID NO: 110 - DNA, 1650 bp, Homo sapiens
gccttttttgcagtctcaggacgggcgctttggagccggccccaggcagcgtgtgtcggtcgcctagtctggagaactagtcctcgactcacggtgagggaatggaccgacacgggtattgtaccgctgagggaaaggagcgggactccggacctccaggagtgcaaggatgatgctgaaaggaataacaaggcttatctctaggatccataagttggaccctgggcgttttttacacatggggacccaggctcgccaaagcattgctgctcacctagataaccaggttccagttgagagtccgagagctatttcccgcaccaatgagaatgacccggccaagcatggggatcagcacgagggtcagcactacaacatctccccccaggatttggagactgtatttccccatggccttcctcctcgctttgtgatgcaggtgaagacattcagtgaagcttgcctgatggtaaggaaaccagccctagaacttctgcattacctgaaaaacaccagttttgcttatccagctatacgatatcttctgtatggagagaagggaacaggaaaaaccctaagtctttgccatgttattcatttctgtgcaaaacaggactggctgatactacatattccagatgctcatctttgggtgaaaaattgtcgggatcttctgcagtccagctacaacaaacagcgctttgatcaacctttagaggcttcaacctggctgaagaatttcaaaactacaaatgagcgcttcctgaaccagataaaagttcaagagaagtatgtctggaataagagagaaagcactgagaaagggagtcctctgggagaagtggttgaacagggcataacacgggtgaggaacgccacagatgcagttggaattgtgctgaaagagctaaagaggcaaagttctttgggtatgtttcacctcctagtggccgtggatggaatcaatgctctttggggaagaaccactctgaaaagagaagataaaagcccgattgcccccgaggaattagcacttgttcacaacttgaggaaaatgatgaaaaatgattggcatggaggcgccattgtgtcggctttgagccagactgggtctctctttaagccccggaaagcctatctgccccaggagttgctgggaaaggaaggatttgatgccctggatccctttattcccatcctggtttccaactataacccaaaggaatttgaaagttgtattcagtattatttggaaaacaattggcttcaacatgagaaagctcctacagaagaagggaaaaaagagctgctgttcctaagtaacgcgaacccctcgctgctggagcggcactgtgcctacctctaagccaagatcacagcatgtgaggaagacagtggacatctgctttatgctggacccagtaagatgaggaagtcgggcagtacacaggaagaggagccaggcccttgtacctatgggattggacaggactgcagttggctctggacctgcattaaaatgggtttcactgtgaatgcgtgacaataagatattcccttgttcctaaaactttatatcagtttattggatgtggtttttcacatttaagataattatggctcttttcctaaaaaataaaatatctttct

SEQ ID NO: 111 - DNA, 2566 bp, Homo sapiens
cgctttttttttttttttctttttttgagatggagcttgctctgtcacccaggctggagtgcagtggcacgatcacagctcactgcaacttccgccacctgggttcaagcaattttcctgcttcaacctcccgagtagttgagattacaggcacgtgccaccacacctgactgatttttgtatttttagtagagacagggtttcaccatgttggccaggctggtcttgaactcctgacctcaagtgatccacccacctcagtctaccaaagtgctgggattacaggttgtgagccactgcacccggcctctgtctgacttttaaatgatggagtatcccagaggtcaggctttagagctcttctttcttccatctacagagtgctcatttctttggtgatctcattcagtctcacggctttgaatgttatatgctgataagtcccaactttctctgtctcgcctaaacttcccctaatagcagaacctgatatcaaagtgcctatttgacatctccacttagatatctaataagcatctttaatgtaaaatttccaaaactgagctcctacaattccctcccacacttgttcagttttccccatctaagctaatggcaactccatccctccagttgctttggccaaaacttttgagttgtctttgactgctttttttctcccttcttacattgtgctcatcctttctttcaggcaaattctgtttggtataccttcaaatatatctagaattctatacttctcactacccctcattcccattatctttgaaacacactccaatgaggtttttacccccactattccaccaaaaacactcttgtgaaagtcaccagatgatggttcttcaggctatcatctgtctcctgaattattttaagagcctccctaactggtctccttgttccagcccctgctcccttcactctattctcaatacaacagtcagagggatcttataaaaccgtaagtcagatcatataattctgtgtgaaaccctccaatgttatcccacttcagagtaaaagttaaagggtttattttgatctctaaatattttgatccctatgatctagtctcttcttacccaaagtatgggcctcataccagcagaactggcattctctgggagcttgttagaaatgtagaatctctggtcctaagattttctaaatcagaatctgcattttcatcagctctcttggcaattcatatgtttgagaaggactgatgtagtcctctactgcctctcctgctgctatgtgctgctctagtcacactgtcctcctggctatttcgataagatggaaactctcctgcctcagggcttttgcacctactgctccctctgtctaggataatcttccccagaaaactgcatgccagttgccttatttccttcaggtctttattgaagtcactttctcattaaacactttctggcccatcctgtctaaaactgcatccccaaacccttcctatcccttttctccacttttttctttttttaaactatagttcttatcaacatagtatatgttttgcttatttatcctgtttattgtctgactcaacaagtataatttgacaaagaaaaatgatacttctctttttttgctgttccaccaaatacaattcaaatgctttttgttttatttttttaccaattccaatttcaaaatgtctcaatggtgctataataaataaacttcaacactctttatgataacaacactgtgttatattctttgaatcctagcccatctgcagagcaatgactgtgctcaccagtaaaagataacctttctttctgaaatagtcaaatacgaaattagaaaagccctccctattttaactacctcaactggtcagaaacacagattgtattctatgagtcccagaagatgaaaaaaattttatacgttgataaaacttataaatttcattgattaatctcctggaagattggtttaaaaagaaaagtgtaatgcaagaatttaaagaaatatttttaaagccacaattattttaatattggatatcaactgcttgtaaaggtgctcctcctttttcttgtcattgctggtcaagattactaatatttgggaaggctttaaagacgcatgttatggtgctaatgtactttcacttttaaactctagatcagaattgttgacttgcattcagaacataaatgcacaaaatctgtacatgtctcccatcagaaagattcattggcatgccacaggggattctcctccttcatcctgtaaaggtcaacaataaaaaccaaattatggggctgcttttgtcacactagcatagagaatgtgttgaaatttaactttgtaagcttgtatgtggttgttgatcttttttttccttacagacacccataataaaatatcatattaaaaaaaaaaaaaaaaaaaaaaaaaaaaaaaaaaaaaaaaaaaaaaaaaaaaaaaaaaaaaaaaaaaaaaaaaaaaaaaaaaaaaaaaaaaaaaaaaaaaaaaaaaaaaaaaaaaaaaaaaaaaaaaaaaaaaa

SEQ ID NO: 112 - DNA, 2067 bp, Homo sapiens
cgctttttttttttttttttatgaataaattgtatgtgtttctagctgaaactactcaccaatatgcatgttaaattcaatcctctcttacctattctttgatataactccttgaagttttcccattctcctacatcatctcccccacccccactgagtcatttctataatacaaacatattatctttttattaaattaaaaatctacctgtacaccttgaatgacaatgctcggagctcccctgtggtcatcgacgcctccactgccattgatgcaccatccaacctgcgtttcctggccaccacacccaattccttgctggtatcatggcagccgccacgtgccaggattaccggctacatcatcaagtatgagaagcctgggtctcctcccagagaagtggtccctcggccccgccctggtgtcacagaggctactattactggcctggaaccgggaaccgaatatacaatttatgtcattgccctgaagaataatcagaagagcgagcccctgattggaaggaaaaagacaggacaagaagctctctctcagacaaccatctcatgggccccattccaggacacttctgagtacatcatttcatgtcatcctgttggcactgatgaagaacccttacagttcagggttcctggaacttctaccagtgccactctgacaggcctcaccagaggtgccacctacaacatcatagtggaggcactgaaagaccagcagaggcataaggttcgggaagaggttgttaccgtgggcaactctgtcaacgaaggcttgaaccaacctacggatgactcgtgctttgacccctacacagtttcccattatgccgttggagatgagtgggaacgaatgtctgaatcaggctttaaactgttgtgccagtgcttaggctttggaagtggtcatttcagatgtgattcatctagatggtgccatgacaatggtgtgaactacaagattggagagaagtgggaccgtcagggagaaaatggccagatgatgagctgcacatgtcttgggaacggaaaaggagaattcaagtgtgaccctcatgaggcaacgtgttatgatgatgggaagacataccacgtaggagaacagtggcagaaggaatatctcggtgccatttgctcctgcacatgctttggaggccagcggggctggcgctgtgacaactgccgcagacctgggggtgaacccagtcccgaaggcactactggccagtcctacaaccagtattctcagagataccatcagagaacaaacactaatgttaattgcccaattgagtgcttcatgcctttagatgtacaggctgacagagaagattcccgagagtaaatcatctttccaatccagaggaacaagcatgtctctctgccaagatccatctaaactggagtgatgttagcagacccagcttagagttcttctttctttcttaagccctttgctctggaggaagttctccagcttcagctcaactcacagcttctccaagcatcaccctgggagtttcctgagggttttctcataaatgagggctgcacattgcctgttctgcttcgaagtattcaataccgctcagtattttaaatgaagtgattctaagatttggtttgggatcaataggaaagcatatgcagccaaccaagatgcaaatgttttgaaatgatatgaccaaaattttaagtaggaaagtcacccaaacacttctgctttcacttaagtgtctggcccgcaatactgtaggaacaagcatgatcttgttactgtgatattttaaatatccacagtactcactttttccaaatgatcctagtaattgcctagaaatatctttctcttacctgttatttatcaatttttcccagtatttttatacggaaaaaattgtattgaaaacacttagtatgcagttgataagaggaatttggtataattatggtgggtgattattttttatactgtatgtgccaaagctttactactgtggaaagacaactgttttaataaaagatttacattccaaaaaaaaaaaaaaa

SEQ ID NO: 113 - DNA, 1752 bp, Homo sapiens
ctgctccttctaggatctccgcctggttcggcccgcctgcctccactcctgcctccaccatgtccatcagggtgacccagaagtcctacaaggtgtccacctctggcccccgggccttcagcagccgctcctacacgagtgggcccggttcccgcatcagctcctcgagcttctcccgagtgggcagcagcaactttcgcggtggcctgggcggcggctatggtggggccagcggcatgggaggcatcaccgcagttacggtcaaccagagcctgctgagcccccttgtcctggaggtggaccccaacatccaggccgtgcgcacccaggagaaggagcagatcaagaccctcaacaacaagtttgcctccttcatagacaaggtacggttcctggagcagcagaacaagatgctggagaccaagtggagcctcctgcagcagcagaagacggctcgaagcaacatggacaacatgttcgagagctacatcaacaaccttaggcggcagctggagactctgggccaggagaagctgaagctggaggcggagcttggcaacatgcaggggctggtggaggacttcaagaacaagtatgaggatgagatcaataagcgtacagagatggagaacgaatttgtcctcatcaagaaggatgtggatgaagcttacatgaacaaggtagagctggagtctcgcctggaagggctgaccgacgagatcaacttcctcaggcagctatatgaagaggagatccgggagctgcagtcccagatctcggacacatctgtggtgctgtccatggacaacagccgctccctggacatggacagcatcattgctgaggtcaaggcacagtacgaggatattgccaaccgcagccgggctgaggctgagagcatgtaccagatcaagtatgaggagctgcagagcctggctgggaagcacggggatgacctgcggcgcacaaagactgagatctctgagatgaaccggaacatcagccggctccaggctgagattgagggcctcaaaggccagagggcttccctggaggccgccattgcagatgccgagcagcgtggagagctggccattaaggatgccaacgccaagttgtccgagctggaggccgccctgcagcgggccaagcaggacatggcgcggcagctgcgtgagtaccaggagctgatgaacgtcaagctggccctggacatcgagatcgccacctacaggaagctgctggagggcgaggagagccggctggagtctgggatgcagaacatgagtattcatacgaagaccaccagcggctatgcaggtggtctgagctcggcctatgggggcctcacaagccccggcctcagctacagcctgggctccagctttggctctggcgcgggctccagctccttcagccgcaccagctcctccagggccgtggttgtgaagaagatcgagacacgtgatgggaagctggtgtctgagtcctctgacgtcctgcccaagtgaacagctgcggcagcccctcccagcctacccctcctgcgctgccccagagcctgggaaggaggccgctatgcagggtagcactgggaacaggagacccacctgaggctcagccctagccctcagcccacctggggagtttactacctggggaccccccttgcccatgcctccagctacaaaacaattcaattgctttttttttttggtccaaaataaaacctcagctagctctgccaaaccc

SEQ ID NO: 114 - DNA, 1412 bp, Homo sapiens
cggggtcgtccgcaaagcctgagtcctgtcctttctctctccccggacagcatgagcttcaccactcgctccaccttctccaccaactaccggtccctgggctctgtccaggcgcccagctacggcgcccggccggtcagcagcgcggccagcgtctatgcaggcgctgggggctctggttcccggatctccgtgtcccgctccaccagcttcaggggcggcatggggtccgggggcctggccaccgggatagccgggggtctggcaggaatgggaggcatccagaacgagaaggagaccatgcaaagcctgaacgaccgcctggcctcttacctggacagagtgaggagcctggagaccgagaaccggaggctggagagcaaaatccgggagcacttggagaagaagggaccccaggtcagagactggagccattacttcaagatcatcgaggacctgagggctcagatcttcgcaaatactgtggacaatgcccgcatcgttctgcagattgacaatgcccgtcttgctgctgatgactttagagtcaagtatgagacagagctggccatgcgccagtctgtggagaacgacatccatgggctccgcaaggtcattgatgacaccaatatcacacgactgcagctggagacagagatcgaggctctcaaggaggagctgctcttcatgaagaagaaccacgaagaggaagtaaaaggcctacaagcccagattgccagctctgggttgaccgtggaggtagatgcccccaaatctcaggacctcgccaagatcatggcagacatccgggcccaatatgacgagctggctcggaagaaccgagaggagctagacaagtactggtctcagcagattgaggagagcaccacagtggtcaccacacagtctgctgaggttggagctgctgagacgacgctcacagagctgagacgtacagtccagtccttggagatcgacctggactccatgagaaatctgaaggccagcttggagaacagcctgagggaggtggaggcccgctacgccctacagatggagcagctcaacgggatcctgctgcaccttgagtcagagctggcacagacccgggcagagggacagcgccaggcccaggagtatgaggccctgctgaacatcaaggtcaagctggaggctgagatcgccacctaccgccgcctgctggaagatggcgaggactttaatcttggtgatgccttggacagcagcaactccatgcaaaccatccaaaagaccaccacccgccggatagtggatggcaaagtggtgtctgagaccaatgacaccaaagttctgaggcattaagccagcagaagcagggtaccctttggggagcaggaggccaataaaaagttcagagttcattggatgtc

SEQ ID NO: 115 - DNA, 1407 bp, Homo sapiens
cgcgaatcgcagcttctgagaccagggttgctccgtccgtgctccgcctcgccatgacttcctacagctatcgccagtcgtcggccacgtcgtccttcggaggcctgggcggcggctccgtgcgttttgggccgggggtcgcctttcgcgcgcccagcattcacgggggctccggcggccgcggcgtatccgtgtcctccgcccgctttgtgtcctcgtcctcctcgggggcctacggcggcggctacggcggcgtcctgaccgcgtccgacgggctgctggcgggcaacgagaagctaaccatgcagaacctcaacgaccgcctggcctcctacctggacaaggtgcgcgccctggaggcggccaacggcgagctagaggtgaagatccgcgactggtaccagaagcaggggcctgggccctcccgcgactacagccactactacacgaccatccaggacctgcgggacaagattcttggtgccaccattgagaactccaggattgtcctgcagatcgacaatgcccgtctggctgcagatgacttccgaaccaagtttgagacggaacaggctctgcgcatgagcgtggaggccgacatcaacggcctgcgcagggtgctggatgagctgaccctggccaggaccgacctggagatgcagatcgaaggcctgaaggaagagctggcctacctgaagaagaaccatgaggaggaaatcagtacgctgaggggccaagtgggaggccaggtcagtgtggaggtggattccgctccgggcaccgatctcgccaagatcctgagtgacatgcgaagccaatatgaggtcatggccgagcagaaccggaaggatgctgaagcctggttcaccagccggactgaagaattgaaccgggaggtcgctggccacacggagcagctccagatgagcaggtccgaggttactgacctgcggcgcacccttcagggtcttgagattgagctgcagtcacagctgagcatgaaagctgccttggaagacacactggcagaaacggaggcgcgctttggagcccagctggcgcatatccaggcgctgatcagcggtattgaagcccagctgggcgatgtgcgagctgatagtgagcggcagaatcaggagtaccagcggctcatggacatcaagtcgcggctggagcaggagattgccacctaccgcagcctgctcgagggacaggaagatcactacaacaatttgtctgcctccaaggtcctctgaggcagcaggctctggggcttctgctgtcctttggagggtgtcttctgggtagagggatgggaaggaagggacccttacccccggctcttctcctgacctgccaataaaaatttatggtccaagggaaaaaaaaaaaaaaaaaaaaaaaaaa

SEQ ID NO: 116 - DNA, 1723 bp, Homo sapiens
caaccatcctgaagctacaggtgctccctcctggaatctccaatggatttcagtcgcagaagcttccacagaagcctgagctcctccttgcaggcccctgtagtcagtacagtgggcatgcagcgcctcgggacgacacccagcgtttatgggggtgctggaggccggggcatccgcatctccaactccagacacacggtgaactatgggagcgatctcacaggcggcggggacctgtttgttggcaatgagaaaatggccatgcagaacctaaatgaccgtctagcgagctacctagaaaaggtgcggaccctggagcagtccaactccaaacttgaagtgcaaatcaagcagtggtacgaaaccaacgccccgagggctggtcgcgactacagtgcatattacagacaaattgaagagctgcgaagtcagattaaggatgctcaactgcaaaatgctcggtgtgtcctgcaaattgataatgctaaactggctgctgaggacttcagactgaagtatgagactgagagaggaatacgtctaacagtggaagctgatctccaaggcctgaataaggtctttgatgacctaaccctacataaaacagatttggagattcaaattgaagaactgaataaagacctagctctcctcaaaaaggagcatcaggaggaagtcgatggcctacacaagcatctgggcaacactgtcaatgtggaggttgatgctgctccaggcctgaaccttggcgtcatcatgaatgaaatgaggcagaagtatgaagtcatggcccagaagaaccttcaagaggccaaagaacagtttgagagacagactgcagttctgcagcaacaggtcacagtgaatactgaagaattaaaaggaactgaggttcaactaacggagctgagacgcacctcccagagccttgagatagaactccagtcccatctcagcatgaaagagtctttggagcacactctagaggagaccaaggcccgttacagcagccagttagccaacctccagtcgctgttgagctctctggaggcccaactgatgcagattcggagtaacatggaacgccagaacaacgaataccatatccttcttgacataaagactcgacttgaacaggaaattgctacttaccgccgccttctggaaggagaagacgtaaaaactacagaatatcagttaagcaccctggaagagagagatataaagaaaaccaggaagattaagacagtcgtgcaagaagtagtggatggcaaggtcgtgtcatctgaagtcaaagaggtggaagaaaatatctaaatagctaccagaaggagatgctgctgaggttttgaaagaaatttggctataatcttatctttgctccctgcaagaaatcagccataagaaagcactattaatactctgcagtgattagaaggggtggggtggcgggaatcctatttatcagactctgtaattgaatataaatgttttactcagaggagctgcaaattgcctgcaaaaatgaaatccagtgagcactagaatatttaaaacatcattactgccatctttatcatgaagcacatcaattacaagctgtagaccacctaatatcaatttgtaggtaatgttcctgaaaattgcaatacatttcaattatactaaacctcacaaagtagaggaatccatgtaaattgcaaataaaccactttctaatttt

SEQ ID NO: 117 - DNA, 4139 bp, Homo sapiens
ccgctccacctctcaagcagccagcgcctgcctgaatctgttctgccccctccccacccatttcaccaccaccatgacaccgggcacccagtctcctttcttcctgctgctgctcctcacagtgcttacagttgttacaggttctggtcatgcaagctctaccccaggtggagaaaaggagacttcggctacccagagaagttcagtgcccagctctactgagaagaatgctgtgagtatgaccagcagcgtactctccagccacagccccggttcaggctcctccaccactcagggacaggatgtcactctggccccggccacggaaccagcttcaggttcagctgccacctggggacaggatgtcacctcggtcccagtcaccaggccagccctgggctccaccaccccgccagcccacgatgtcacctcagccccggacaacaagccagccccgggctccaccgcccccccagcccacggtgtcacctcggccccggacaccaggccggccccgggctccaccgcccccccagcccacggtgtcacctcggccccggacaccaggccggccccgggctccaccgcccccccagcccacggtgtcacctcggccccggacaccaggccggccccgggctccaccgcccccccagcccacggtgtcacctcggccccggacaccaggccggccccgggctccaccgcccccccagcccacggtgtcacctcggccccggacaccaggccggccccgggctccaccgcccccccagcccacggtgtcacctcggccccggacaccaggccggccccgggctccaccgcccccccagcccacggtgtcacctcggccccggacaccaggccggccccgggctccaccgcccccccagcccacggtgtcacctcggccccggacaccaggccggccccgggctccaccgcccccccagcccacggtgtcacctcggccccggacaccaggccggccccgggctccaccgcccccccagcccacggtgtcacctcggccccggacaccaggccggccccgggctccaccgcccccccagcccacggtgtcacctcggccccggacaccaggccggccccgggctccaccgcccccccagcccacggtgtcacctcggccccggacaccaggccggccccgggctccaccgcccccccagcccacggtgtcacctcggccccggacaccaggccggccccgggctccaccgcccccccagcccacggtgtcacctcggccccggacaccaggccggccccgggctccaccgcccccccagcccacggtgtcacctcggccccggacaccaggccggccccgggctccaccgcccccccagcccacggtgtcacctcggccccggacaccaggccggccccgggctccaccgcccccccagcccacggtgtcacctcggccccggacaccaggccggccccgggctccaccgcccccccagcccacggtgtcacctcggccccggacaccaggccggccccgggctccaccgcccccccagcccacggtgtcacctcggccccggacaccaggccggccccgggctccaccgcccccccagcccacggtgtcacctcggccccggacaccaggccggccccgggctccaccgcccccccagcccacggtgtcacctcggccccggacaccaggccggccccgggctccaccgcccccccagcccacggtgtcacctcggccccggacaccaggccggccccgggctccaccgcccccccagcccacggtgtcacctcggccccggacaccaggccggccccgggctccaccgcccccccagcccacggtgtcacctcggccccggacaccaggccggccccgggctccaccgcccccccagcccacggtgtcacctcggccccggacaccaggccggccccgggctccaccgcccccccagcccacggtgtcacctcggccccggacaccaggccggccccgggctccaccgcccccccagcccacggtgtcacctcggccccggacaccaggccggccccgggctccaccgcccccccagcccacggtgtcacctcggccccggacaccaggccggccccgggctccaccgcccccccagcccacggtgtcacctcggccccggacaccaggccggccccgggctccaccgcccccccagcccacggtgtcacctcggccccggacaccaggccggccccgggctccaccgcccccccagcccacggtgtcacctcggccccggacaccaggccggccccgggctccaccgcccccccagcccacggtgtcacctcggccccggacaccaggccggccccgggctccaccgcccccccagcccacggtgtcacctcggccccggacaccaggccggccccgggctccaccgcccccccagcccacggtgtcacctcggccccggacaccaggccggccccgggctccaccgcccccccagcccacggtgtcacctcggccccggacaccaggccggccccgggctccaccgcccccccagcccacggtgtcacctcggccccggacaccaggccggccccgggctccaccgcccccccagcccacggtgtcacctcggccccggacaccaggccggccccgggctccaccgcccccccagcccacggtgtcacctcggccccggacaccaggccggccccgggctccaccgcccccccagcccacggtgtcacctcggccccggacaccaggccggccccgggctccaccgcccccccagcccacggtgtcacctcggccccggacaccaggccggccccgggctccaccgcccccccagcccatggtgtcacctcggccccggacaacaggcccgccttgggctccaccgcccctccagtccacaatgtcacctcggcctcaggctctgcatcaggctcagcttctactctggtgcacaacggcacctctgccagggctaccacaaccccagccagcaagagcactccattctcaattcccagccaccactctgatactcctaccacccttgccagccatagcaccaagactgatgccagtagcactcaccatagctcggtacctcctctcacctcctccaatcacagcacttctccccagttgtctactggggtctctttctttttcctgtcttttcacatttcaaacctccagtttaattcctctctggaagatcccagcaccgactactaccaagagctgcagagagacatttctgaaatgtttttgcagatttataaacaagggggttttctgggcctctccaatattaagttcaggccaggatctgtggtggtacaattgactctggccttccgagaaggtaccatcaatgtccacgacgtggagacacagttcaatcagtataaaacggaagcagcctctcgatataacctgacgatctcagacgtcagcgtgagtgatgtgccatttcctttctctgcccagtctggggctggggtgccaggctggggcatcgcgctgctggtgctggtctgtgttctggttgcgctggccattgtctatctcattgccttggctgtctgtcagtgccgccgaaagaactacgggcagctggacatctttccagcccgggatacctaccatcctatgagcgagtaccccacctaccacacccatgggcgctatgtgccccctagcagtaccgatcgtagcccctatgagaaggtttctgcaggtaacggtggcagcagcctctcttacacaaacccagcagtggcagccgcttctgccaacttgtagggcacgtcgccgctgagctgagtggccagccagtgccattccactccactcaggttcttcaggccagagcccctgcaccctgtttgggctggtgagctgggagttcaggtgggctgctcacagcctccttcagaggccccaccaatttctcggacacttctcagtgtgtggaagctcatgtgggcccctgaggctcatgcctgggaagtgttgtgggggctcccaggaggactggcccagagagccctgagatagcggggatcctgaactggactgaataaaacgtggtctcccactg

SEQ ID NO: 118 - DNA, 15720 bp, Homo sapiens
caacccacaccgcccctgccagccaccatggggctgccactagcccgcctggcggctgtgtgcctggccctgtctttggcagggggctcggagctccagacagagggcagaacccgataccacggccgcaacgtctgcagcacctggggcaacttccactacaagaccttcgacggggacgtcttccgcttccccggcctctgcgactacaacttcgcctccgactgccgaggctcctacaaggaatttgctgtgcacctgaagcggggtccgggccaggctgaggcccccgccggggtggagtccatcctgctgaccatcaaggatgacaccatctacctcacccgccacctggctgtgcttaacggggccgtggtcagcaccccgcactacagccccgggctgctcattgagaagagcgatgcctacaccaaagtctactcccgcgccggcctcaccctcatgtggaaccgggaggatgcactcatgctggagctggacactaagttccggaaccacacctgtggcctctgcggggactacaacggcctgcagagctattcagaattcctctctgacggcgtgctcttcagtcccctggagtttgggaacatgcagaagatcaaccagcccgatgtggtgtgtgaggatcccgaggaggaggtggcccccgcatcctgctccgagcaccgcgccgagtgtgagaggctgctgaccgccgaggccttcgcggactgtcaggacctggtgccgctggagccgtatctgcgcgcctgccagcaggaccgctgccggtgcccgggcggtgacacctgcgtctgcagcaccgtggccgagttctcccgccagtgctcccacgccggcggccggcccgggaactggaggaccgccacgctctgccccaagacctgccccgggaacctggtgtacctggagagcggctcgccctgcatggacacctgctcacacctggaggtgagcagcctgtgcgaggagcaccgcatggacggctgtttctgcccagaaggcaccgtatatgacgacatcggggacagtggctgcgttcctgtgagccagtgccactgcaggctgcacggacacctgtacacaccgggccaggagatcaccaatgactgcgagcagtgtgtctgtaacgctggccgctgggtgtgcaaagacctgccctgccccggcacctgtgccctggaaggcggctcccacatcaccaccttcgatgggaagacgtacaccttccacggggactgctactatgtcctggccaagggtgaccacaacgattcctacgctctcctgggcgagctggccccctgtggctccacagacaagcagacctgcctgaagacggtggtgctgctggctgacaagaagaagaatgcggtggtcttcaagtccgatggcagtgtactgctcaaccagctgcaggtgaacctgccccacgtgaccgcgagcttctctgtcttccgcccgtcttcctaccacatcatggtgagcatggccattggcgtccggctgcaggtgcagctggccccagtcatgcaactctttgtgacactggaccaggcctcccaggggcaggtgcagggcctctgcgggaacttcaacggcctggaaggtgacgacttcaagacggccagcgggctggtggaggccacgggggccggctttgccaacacctggaaggcacagtcaacctgccatgacaagctggactggttggacgatccctgctccctgaacatcgagagcgccaactacgccgagcactggtgctccctcctgaagaagacagagaccccctttggcaggtgccactcggctgtggaccctgctgagtattacaagaggtgcaaatatgacacgtgtaactgtcagaacaatgaggactgcctgtgcgccgccctgtcctcctacgcgcgcgcctgcaccgccaagggcgtcatgctgtggggctggcgggagcatgtctgcaacaaggatgtgggctcctgccccaactcgcaggtcttcctgtacaacctgaccacctgccagcagacctgccgctccctctccgaggccgacagccactgtctcgagggctttgcgcctgtggacggctgcggctgccctgaccacaccttcctggacgagaagggccgctgcgtacccctggccaagtgctcctgttaccaccgcggtctctacctggaggcgggggatgtggtcgtcaggcaggaagaacgatgtgtgtgccgggatgggcggctgcactgtaggcagatccggctgatcggccagagctgcacggccccaaagatccacatggactgcagcaacctgactgcactggccacctcgaagccccgagccctcagctgccagacgctggccgccggctattaccacacagagtgtgtcagtggctgtgtgtgccccgacgggctgatggatgacggccggggtggctgcgtggtggagaaggaatgcccttgcgtccataacaacgacctgtattcttccggcgccaagatcaaggtggactgcaatacctgcacctgcaagagaggacgctgggtgtgcacccaggctgtgtgccatggcacctgctccatttacgggagtggccactacatcacctttgatgggaagtactacgactttgacggacactgctcctacgtggctgttcaggactactgcggccagaactcctcactgggctcattcagcatcatcaccgagaacgtcccctgtggcactacgggcgtcacctgctccaaggccatcaagatcttcatggggaggacggagctgaagttggaagacaagcaccgtgtggtgatccagcgtgatgagggtcaccacgtggcctacaccacgcgggaggtgggccagtacctggtggtggagtccagcacgggcatcatcgtcatctgggacaagaggaccaccgtgttcatcaagctggctccctcctacaagggcaccgtgtgtggcctgtgtgggaactttgaccaccgctccaacaacgacttcaccacgcgggaccacatggtggtgagcagcgagctggacttcgggaacagctggaaggaggcccccacctgcccagatgtgagcaccaaccccgagccctgcagcctgaacccgcaccgccgctcctgggccgagaagcagtgcagcatcctcaaaagcagcgtgttcagcatctgccacagcaaggtggaccccaagcccttctacgaggcctgtgtgcacgactcgtgctcctgtgacacgggtggggactgtgagtgcttctgctctgccgtggcctcctacgcccaggagtgtaccaaagagggggcctgcgtgttctggaggacgccggacctgtgccccatattctgcgactactacaaccctccgcatgagtgtgagtggcactatgagccatgtgggaaccggagcttcgagacctgcaggaccatcaacggcatccactccaacatctccgtgtcctacctggagggctgctacccccggtgccccaaggacaggcccatctatgaggaggatctgaagaagtgtgtcactgcagacaagtgtggctgctatgtcgaggacacccactacccacctggagcatcggttcccaccgaggagacctgcaagtcctgcgtgtgtaccaactcctcccaagtcgtctgcaggccggaggaaggaaagattcttaaccagacccaggatggcgccttctgctactgggagatctgtggccccaacgggacggtggagaagcacttcaacatctgttccattacgacacgcccgtccaccctgaccaccttcaccaccatcaccctccccaccacccccacctccttcaccactaccaccaccaccaccaccccgacctccagcacagttttatcaacaactccgaagctgtgctgcctctggtctgactggatcaatgaggaccaccccagcagtggcagcgacgacggtgaccgagaaccatttgatggggtctgcggggcccctgaggacatcgagtgcaggtcggtcaaggatccccacctcagcttggagcagcatggccagaaggtgcagtgtgatgtctctgttgggttcatttgcaagaatgaagaccagtttggaaatggaccatttggactgtgttacgactacaagatacgtgtcaattgttgctggcccatggataagtgtatcaccactcccagccctccaactaccactcccagccctccaccaaccacgacgaccacccttccaccaaccaccacccccagccctccaaccaccaccacaaccacccctccaccaaccaccacccccagccctccaataaccaccacgaccacccctctaccaaccaccactcccagccctccaataagcaccacaaccacccctccaccaaccaccactcccagccctccaaccaccactcccagccctccaaccaccactcccagccctccaacaaccaccacaaccacccctccaccaaccaccactcccagccctccaatgactacgcccatcactccaccagccagcactaccacccttccaccaaccaccactcccagccctccaacaaccaccacaaccacccctccaccaaccaccactcccagtcctccaacgactacgcccatcactccaccaaccagcactactacccttccaccaaccaccactcccagccctccaccaaccaccacaaccacccctccaccaaccaccactcccagccctccaacaaccaccactcccagtcctccaacaatcaccacaaccacccctccaccaaccaccactcccagccctccaacaacgaccacaaccacccctccaccaaccaccactcccagccctccaacgactacacccatcactccaccaaccagcactaccacccttccaccaaccaccactcccagccctccaccaaccaccacaaccacccctccaccaaccaccactcccagccctccaacaaccaccactcccagccctccaataaccaccacaaccacccctccaccaaccaccactcccagctctccaataaccaccactcccagccctccaacaaccaccatgaccaccccttcaccaaccaccacccccagctctccaataaccaccacaaccaccccttcctcaactaccactcccagccctccaccaaccaccatgaccaccccttcaccaaccaccactcccagccctccaacaaccaccatgaccacccttccaccaaccaccacttccagccctctaacaactactcctctacctccatcaataactcctcctacattttcaccattctcaacgacaacccctactaccccatgcgtgcctctctgcaattggactggctggctggattctggaaaacccaactttcacaaaccaggtggagacacagaattgattggagacgtctgtggaccaggctgggcagctaacatctcttgcagagccaccatgtatcctgatgttcccattggacagcttggacaaacagtggtgtgtgatgtctctgtggggctgatatgcaaaaatgaagaccaaaagccaggtggggtcatccctatggccttctgcctcaactacgagatcaacgttcagtgctgtgagtgtgtcacccaacccaccaccatgacaaccaccaccacagagaacccaactccgccaaccacgacacccatcaccaccaccactacggtgaccccaaccccaacacccaccggcacacagaccccaaccacgacacccatcaccaccaccactacggtgaccccaaccccaacacccaccggcacacagaccccaaccacgacacccatcaccaccaccactacggtgaccccaaccccaacacccaccggcacacagaccccaaccacgacacccatcaccaccaccactacggtgaccccaaccccaacacccaccggcacacagaccccaaccacgacacccatcaccaccaccactacggtgaccccaaccccaacacccaccggcacacagaccccaaccacgacacccatcaccaccaccactacggtgaccccaaccccaacacccaccggcacacagaccccaaccacgacacccatcaccaccaccactacggtgaccccaaccccaacacccaccggcacacagaccccaaccacgacacccatcaccaccaccactacggtgaccccaaccccaacacccaccggcacacagaccccaaccacgacacccatcaccaccaccactacggtgaccccaaccccaacacccaccggcacacagaccccaaccacgacacccatcaccaccaccactacggtgaccccaaccccaacacccaccggcacacagaccccaaccacgacacccatcaccaccaccactacggtgaccccaaccccaacacccaccggcacacagaccccaaccacgacacccatcaccaccaccactacggtgaccccaaccccaacacccaccggcacacagaccccaaccacgacacccatcaccaccaccactacggtgaccccaaccccaacacccaccggcacacagaccccaaccacgacacccatcaccaccaccactacggtgaccccaaccccaacacccaccggcacacagaccccaaccacgacacccatcaccaccaccactacggtgaccccaaccccaacacccaccggcacacagaccccaaccacgacacccatcaccaccaccactacggtgaccccaaccccaacacccaccggcacacagaccccaaccacgacacccatcaccaccaccactacggtgaccccaaccccaacacccaccggcacacagaccccaaccacgacacccatcaccaccaccactacggtgaccccaaccccaacacccaccggcacacagaccccaaccacgacacccatcaccaccaccactacggtgaccccaaccccaacacccaccggcacacagaccccaaccacgacacccatcaccaccaccactacggtgaccccaaccccaacacccaccggcacacagaccccaaccacgacacccatcaccaccaccactacggtgaccccaaccccaacacccaccggcacacagaccccaaccacgacacccatcaccaccaccactacggtgaccccaaccccaacacccaccggcacacagaccccaaccacgacacccatcaccaccaccactacggtgaccccaaccccaacacccaccggcacacagaccccaaccacgacacccatcaccaccaccactacggtgaccccaaccccaacacccaccggcacacagaccccaaccacgacacccatcaccaccaccactacggtgaccccaaccccaacacccaccggcacacagaccccaaccacgacacccatcaccaccaccactacggtgaccccaaccccaacacccaccggcacacagaccccaaccacgacacccatcaccaccaccactacggtgaccccaaccccaacacccaccggcacacagaccccaaccacgacacccatcaccaccaccactacggtgaccccaaccccaacacccaccggcacacagaccccaaccacgacacccatcaccaccaccactacggtgaccccaaccccaacacccaccggcacacagaccccaaccacgacacccatcaccaccaccactacggtgaccccaaccccaacacccaccggcacacagaccccaaccacgacacccatcaccaccaccactacggtgaccccaaccccaacacccaccggcacacagaccccaaccacgacacccatcaccaccaccactacggtgaccccaaccccaacacccaccggcacacagaccccaaccacgacacccatcaccaccaccactacggtgaccccaaccccaacacccaccggcacacagaccccaaccacgacacccatcaccaccaccactacggtgaccccaaccccaacacccaccggcacacagaccccaaccacgacacccatcaccaccaccactacggtgaccccaaccccaacacccaccggcacacagaccccaaccacgacacccatcaccaccaccactacggtgaccccaaccccaacacccaccggcacacagaccccaaccacgacacccatcaccaccaccactacggtgaccccaaccccaacacccaccggcacacagaccccaaccacgacacccatcaccaccaccactacggtgaccccaaccccaacacccaccggcacacagaccccaaccacgacacccatcaccaccaccactacggtgaccccaaccccaacacccaccggcacacagaccccaaccacgacacccatcaccaccaccactacggtgaccccaaccccaacacccaccggcacacagaccccaaccacgacacccatcaccaccaccactacggtgaccccaaccccaacacccaccggcacacagaccccaaccacgacacccatcaccaccaccactacggtgaccccaaccccaacacccaccggcacacagaccccaaccacgacacccatcaccaccaccactacggtgaccccaaccccaacacccaccggcacacagaccccaaccacgacacccatcaccaccaccactacggtgaccccaaccccaacacccaccggcacacagaccccaaccacgacacccatcaccaccaccactacggtgaccccaaccccaacacccaccggcacacagaccccaaccacgacacccatcaccaccaccactacggtgaccccaaccccaacacccaccggcacacagaccccaaccacgacacccatcaccaccaccactacggtgaccccaaccccaacacccaccggcacacagaccccaaccacgacacccatcaccaccaccactacggtgaccccaaccccaacacccaccggcacacagaccccaaccacgacacccatcaccaccaccactacggtgaccccaaccccaacacccaccggcacacagaccccaaccacgacacccatcaccaccaccactacggtgaccccaaccccaacacccaccggcacacagaccccaaccacgacacccatcaccaccaccactacggtgaccccaaccccaacacccaccggcacacagaccccaaccacgacacccatcaccaccaccactacggtgaccccaaccccaacacccaccggcacacagaccccaaccacgacacccatcaccaccaccactacggtgaccccaaccccaacacccaccggcacacagaccccaaccacgacacccatcaccaccaccactacggtgaccccaaccccaacacccaccggcacacagaccccaaccacgacacccatcaccaccaccactacggtgaccccaaccccaacacccaccggcacacagaccccaaccacgacacccatcaccaccaccactacggtgaccccaaccccaacacccaccggcacacagaccccaaccacgacacccatcaccaccaccactacggtgaccccaaccccaacacccaccggcacacagaccccaaccacgacacccatcaccaccaccactacggtgaccccaaccccaacacccaccggcacacagaccccaaccacgacacccatcaccaccaccactacggtgaccccaaccccaacacccaccggcacacagaccccaaccacgacacccatcaccaccaccactacggtgaccccaaccccaacacccaccggcacacagaccccaaccacgacacccatcaccaccaccactacggtgaccccaaccccaacacccaccggcacacagaccccaaccacgacacccatcaccaccaccactacggtgaccccaaccccaacacccaccggcacacagaccccaaccacgacacccatcaccaccaccactacggtgaccccaaccccaacacccaccggcacacagaccccaaccacgacacccatcaccaccaccactacggtgaccccaaccccaacacccaccggcacacagaccccaaccacgacacccatcaccaccaccactacggtgaccccaaccccaacacccaccggcacacagaccccaaccacgacacccatcaccaccaccactacggtgaccccaaccccaacacccaccggcacacagaccccaaccacgacacccatcaccaccaccactacggtgaccccaaccccaacacccaccggcacacagaccccaaccacgacacccatcaccaccaccactacggtgaccccaaccccaacacccaccggcacacagaccccaaccacgacacccatcaccaccaccactacggtgaccccaaccccaacacccaccggcacacagaccccaaccacgacacccatcaccaccaccactacggtgaccccaaccccaacacccaccggcacacagaccccaaccacgacacccatcaccaccaccactacggtgaccccaaccccaacacccaccggcacacagaccccaaccacgacacccatcaccaccaccactacggtgaccccaaccccaacacccaccggcacacagaccccaaccacgacacccatcaccaccaccactacggtgaccccaaccccaacacccaccggcacacagaccccaaccacgacacccatcaccaccaccactacggtgaccccaaccccaacacccaccggcacacagaccccaaccacgacacccatcaccaccaccactacggtgaccccaaccccaacacccaccggcacacagaccccaaccacgacacccatcaccaccaccactacggtgaccccaaccccaacacccaccggcacacagaccccaaccacgacacccatcaccaccaccactacggtgaccccaaccccaacacccaccggcacacagaccccaaccacgacacccatcaccaccaccactacggtgaccccaaccccaacacccaccggcacacagaccccaaccacgacacccatcaccaccaccactacggtgaccccaaccccaacacccaccggcacacagaccccaaccacgacacccatcaccaccaccactacggtgaccccaaccccaacacccaccggcacacagaccccaaccacgacacccatcaccaccaccactacggtgaccccaaccccaacacccaccggcacacagaccccaaccacgacacccatcaccaccaccactacggtgaccccaaccccaacacccaccggcacacagaccccaaccacgacacccatcaccaccaccactacggtgaccccaaccccaacacccaccggcacacagaccccaaccacgacacccatcaccaccaccactacggtgaccccaaccccaacacccaccggcacacagaccccaaccacgacacccatcaccaccaccactacggtgaccccaaccccaacacccaccggcacacagaccccaaccacgacacccatcaccaccaccactacggtgaccccaaccccaacacccaccggcacacagaccccaaccacgacacccatcaccaccaccactacggtgaccccaaccccaacacccaccggcacacagaccccaaccacgacacccatcaccaccaccactacggtgaccccaaccccaacacccaccggcacacagaccccaaccacgacacccatcaccaccaccactacggtgaccccaaccccaacacccaccggcacacagaccccaaccacgacacccatcaccaccaccactacggtgaccccaaccccaacacccaccggcacacagaccccaaccacgacacccatcaccaccaccactacggtgaccccaaccccaacacccaccggcacacagaccccaaccacgacacccatcaccaccaccactacggtgaccccaaccccaacacccaccggcacacagaccccaaccacgacacccatcaccaccaccactacggtgaccccaaccccaacacccaccggcacacagaccccaaccacgacacccatcaccaccaccactacggtgaccccaaccccaacacccaccggcacacagaccccaaccacgacacccatcaccaccaccactacggtgaccccaaccccaacacccaccggcacacagaccccaaccacgacacccatcaccaccaccactacggtgaccccaaccccaacacccaccggcacacagaccccaaccacgacacccatcaccaccaccactacggtgaccccaaccccaacacccaccggcacacagaccccaaccacgacacccatcaccaccaccactacggtgaccccaaccccaacacccaccggcacacagaccccaaccacgacacccatcaccaccaccactacggtgaccccaaccccaacacccaccggcacacagaccccaaccacgacacccatcaccaccaccactacggtgaccccaaccccaacacccaccggcacacagaccgggccccccacccacacaagcacagcaccgattgctgagttgaccacatccaatcctccgcctgagtcctcaacccctcagacctctcggtccacctcttcccctctcacggagtcaaccacccttctgagtaccctaccacctgccattgagatgaccagcacggccccaccctccacacccacggcacccacgaccacgagcggaggccacacactgtctccaccgcccagcaccaccacgtcccctccaggcacccccactcgcggtaccacgaccgggtcatcttcagcccccacccccagcactgtgcagacgaccaccaccagtgcctggaccccaacgccgaccccactctccacacccagcatcatcaggaccacaggcctgaggccctacccttcctctgtgcttatctgctgtgtcctgaacgacacctactacgcaccaggtgaggaggtgtacaacggcacatacggagacacctgttatttcgtcaactgctcactgagctgtacgttggagttctataactggtcctgcccatccacgccctccccaacacccacgccctccaagtcgacgcccacgccttccaagccatcgtccacgccctccaagccgacgcccggcaccaagccccccgagtgcccagactttgatcctcccagacaggagaacgagacttggtggctgtgcgactgcttcatggccacgtgcaagtacaacaacacggtggagatcgtgaaggtggagtgtgagccgccgcccatgcccacctgctccaacggcctccaacccgtgcgcgtcgaggaccccgacggctgctgctggcactgggagtgcgactgctactgcacgggctggggcgacccgcactatgtcaccttcgacggactctactacagctaccagggcaactgcacctacgtgctggtggaggagatcagcccctccgtggacaacttcggagtttacatcgacaactaccactgcgatcccaacgacaaggtgtcctgtccccgcaccctcatcgtgcgccacgagacccaggaggtgctgatcaagaccgtgcatatgatgcccatgcaggtgcaggtgcaggtgaacaggcaggcggtggcactgccctacaagaagtacgggctggaggtgtaccagtctggcatcaactacgtggtggacatccccgagctgggtgtcctcgtctcctacaatggcctgtccttctccgtcaggctgccctaccaccggtttggcaacaacaccaagggccagtgtggcacctgcaccaacaccacctccgacgactgcattctgcccagcggggagatcgtctccaactgtgaggctgcggctgaccagtggctggtgaacgacccctccaagccacactgcccccacagcagctccacgaccaagcgcccggccgtcactgtgcccgggggcggtaaaacgaccccacacaaggactgcaccccatctcccctctgccagctcatcaaggacagcctgtttgcccagtgccacgcactggtgcccccgcagcactactacgatgcctgcgtgttcgacagctgcttcatgccgggctcgagcctggagtgcgccagtctgcaggcctacgcagccctctgtgcccagcagaacatctgcctcgactggcggaaccacacgcatggggcctgcttggtggagtgcccatctcacagggagtaccaggcctgtggccctgcagaagagcccacgtgcaaatccagctcctcccagcagaacaacacagtcctggtggaaggctgcttctgtcctgagggcaccatgaactacgctcctggctttgatgtctgcgtgaagacctgcggctgtgtgggacctgacaatgtgcccagagagtttggggagcacttcgagttcgactgcaagaactgtgtctgcctggagggtggaagtggcatcatctgccaacccaagaggtgcagccagaagcccgttacccactgcgtggaagacggcacctacctcgccacggaggtcaaccctgccgacacctgctgcaacattaccgtctgcaagtgcaacaccagcctgtgcaaagagaagccctccgtgtgcccgctgggattcgaagtgaagagcaagatggtgcctggaaggtgctgtcccttctactggtgtgagtccaagggggtgtgtgttcacgggaatgctgagtaccagcccggttctccagtttattcctccaagtgccaggactgcgtgtgcacggacaaggtggacaacaacaccctgctcaacgtcatcgcctgcacccacgtgccctgcaacacctcctgcagccctggcttcgaactcatggaggcccccggggagtgctgtaagaagtgtgaacagacgcactgtatcatcaaacggcccgacaaccagcacgtcatcctgaagcccggggacttcaagagcgacccgaagaacaactgcacattcttcagctgcgtgaagatccacaaccagctcatctcgtccgtctccaacatcacctgccccaactttgatgccagcatttgcatcccgggctccatcacattcatgcccaatggatgctgcaagacctgcacccctcgcaatgagaccagggtgccctgctccaccgtccccgtcaccacggaggtttcgtacgccggctgcaccaagaccgtcctcatgaatcattgctccgggtcctgcgggacatttgtcatgtactcggccaaggcccaggccctggaccacagctgctcctgctgcaaagaggagaaaaccagccagcgtgaggtggtcctgagctgccccaatggcggctcgctgacacacacctacacccacatcgagagctgccagtgccaggacaccgtctgcgggctccccaccggcacctcccgccgggcccggcgctcccctaggcatctggggagcgggtgagcggggtgggcacagcccccttcactgccctcgacagctttacctcccccggaccctctgagcctcctaagctcggcttcctctcttcagatatttattgtctgagtctttgttcagtccttgctttccaataataaactcagggggacatgc

SEQ ID NO: 119 - DNA, 4707 bp, Homo sapiens
gatcaccatcaccgagaccacctcacacagtactcccagctacactacctcaatcaccaccaccgagaccccctcacacagtactcccagctacactacctcaatcaccaccaccgagaccccatcacacagtactcccagcttcacttcttcaatcaccaccaccgagaccacatcccacagtactcccagcttcacttcttcaatcaggaccaccgagaccacatcctacagtactcccagcttcacttcttcaaataccatcactgagaccacctcacacagtactcccagctacattacctcaatcaccaccaccgagaccccctcaagcagtactcccagcttcagttcttcgatcaccaccactgagaccacatcccacagtactcccggcttcacttcttcaatcaccaccactgagactacatcccacagtactcccagcttcacttcttcgatcaccaccactgagaccacctcacatgatactcccagcttcacttcttcaatcaccaccagtgagaccccctcacacagtactcccagctccacttctttaatcaccaccaccaagaccacctcacacagtactcccagcttcacttcttcgatcaccaccaccgagaccacctcacacagtgctcgcagcttcacttcttcgatcaccaccaccgagaccacctcacacaatactcggagcttcacttcttcgatcaccaccaccgagaccaactctcacagtactaccagcttcacttcttcgatcaccaccaccgagaccacctcacacagtactcccagcttcagttcttcaatcaccaccactgagacccccttacacagtactcctggcctaccttcgtgggtcaccaccaccaagaccacctcacacattactcctggcctcacttcttcaatcaccaccactgagactacctcacacagtactcccggcttcacttcttcaatcaccaccactgagaccacctcagagagtactcccagcctcagttcttcaaccatctactccacagtcagcacatccacaactgccatcacctcacattttactacctcagagactgcggtgactcccacacctgtaaccccatcttctctgagtacagacatcccgaccacaagcctacgaactctcaccccttcgtctgtgggcaccagcacttcattgactacaaccacagactttccctctatacccactgatatcagtaccttaccaactcgaacacacatcatttcatcttctccctccatccaaagtacagaaacctcatcccttgtgggcaccacctctcccaccatgtccactgtgagaatgaccctcagaattactgagaacaccccaatcagttcctttagcacaagtattgttgttatacctgaaaccccaacacagacccctcctgtactgacgtcagccactgggacccaaacatctcctgcacctactactgtcacctttggaagtacggattcctccacgtccactcttcatactcttactccatcaacagccttgagcacgatcgtgtcaacatcacaggttcctattcctagcacacattcctccacccttcaaacaactccttctactccctcattgcaaacttcactcacatctacaagtgagttcactacagaatctttcactaggggaagtacgtctacaaatgcaatcttgacttcttttagtaccatcatctggtcctcaacacccactattatcatgtcctcttctccatcttctgccagcataactccagtgttctccactaccattcattctgttccttcttcaccatacattttcagtacagaaaatgtgggctccgcttctatcacaggctttcctagtctctcttcctctgcaactaccagcacttcttcaaccagctcctctctgaccacagctctcactgaaataacccccttttcttatatttcccttccctccaccacaccctgtccaggaactataacaattaccatagtccctgcctctcccactgatccatgtgttgaaatggatcccagcactgaagctacttctcctcccaccaccccattaacagtctttccctttactaccgaaatggtcacctgtcctacctccatcagtatccaaactactcttactacatatatggacacttcttccatgatgccagaaagtgagtccagcatctcacccaatgcttccagttccactggcactgggactgtacccacaaacacagttttcacaagtactcgactgcccaccagtgagacctggctgagcaacagttctgtgatccccctacctcttcctggcgtctctaccatcccgctcaccatgaaaccaagcagtagcctcccgaccatcctgaggacttcaagcaagtcaacacacccatccccacccaccactaggacttcagagacaccagtggccactacccagactcctaccacccttacatcacgcaggacaactcgcatcacttctcagatgaccacacagtccacgttgaccaccactgcaggcacctgtgacaatggtggcacctgggaacagggccagtgtgcttgccttccggggttttctggggaccgctgtcagctccagaccagatgccagaatgggggtcagtgggatggcctcaaatgccagtgccccagcaccttctatggttccagttgtgagtttgctgtggaacaggtggatctagatgcagaagatttttgcagacatgcagggcttcaccttcaagggtgtggagatcctgtccctgaggaatggcagcatcgtggtggactacctggtcctgctggagatgcccttcagcccccagctggagagcgagtatgagcaggtgaagaccacgctgaaggaggggctgcagaacgccagccaggatgtgaacagctgccaggactcccagaccctgtgttttaagcctgactccatcaaggtgaacaacaacagcaagacagagctgaccccggcagccatctgccgcgcgccgctcccacgggctatgaagagttctacttccccttggtggaggccacccggctccgctgtgtcaccaaatgcacgtctggggtggacaacgccatcgactgtcaccagggccagtgcgttctggagacgagcggtcccacgtgtcgctgctactccaccgacacgcactggttctctggcccgcgctgcgaggtggccgtccactggagggcgctggtcggggcctgacggccggcgcgcgctgctggtgctgctgctcgtggcgctgggcgtccgggcggtgcgctccggatggtggggcggccagcgccgaggccggtcctgggaccaggacaggaaatggttcgagacctgggatgaggaagtcgtgggcactttttcaaactggggtttcgaggacgacggaacagacaaggatacaaatttctatgtggccttggagaacgtgacaccactatgaaggtgcacatcaagagacccgagatgacctcgtcctcagtgtgagcctgcggggccccttcaccaccccctccgccctgccccggacacaagggtctgcattgcgtccatttcaagaggtgaccccaggacgcgggcagcccaggctcctgctgttcttgggcaagatgagactgttcccccaaatcccatccttctccttccaacttggctgaaacccacctggagacgcagttcacgtccaggctcttccactgtggaatcttgggcaagtcagtaacgagcctcagtttcctcacctgcaaaacgggtacagcattcctgtatgatacgtcacgccgttgttgtgaaaaccacatagacttggtcaattctcggtcctactctgccctcccgtctcagccctcgtgttgccattgcctctctcggatcctccaatcctcacgtccttcacctggtctctggccctggttcttattttctctcaattccctactgcctgtttcttactttgaacctggaggcagcctgcagccccatcccatctcctgccctctcctgatctaactccctgctgcatctcttgctcccattccttagacgtcctccccttttgaccccgttccttcatccatcctgcaccccagtcccccagccctaaatcctccctcctctcctcacatcctggcccctagcaaggtatagatagcctctgtgtcttaggataccccgggtgctgttccctcggtcatcctgttgcccagttccccgtttctcttgctctcattcctgtatcctttccccttttgagcccgtccattcatcggttctgcccccgactcccccagccctaaataccccagctgctgttccccccatcaccctgctgcccaattctttattctccacccctttctctcacccctggagccctgcgggtgggggcagggcatgagttccccagtccccaaggaaaggcagccccctcagtctccctcctcctcattcccttccatctccctcccctctgccttttaaacccatcccctccgattcccctcctcccccctctctccctggtgtcacctggattcctgcagtaattctgagcccttgaaatcctcagtcgccttggcggggaagattggctttggggacaggaggtcggcacatctccaggtcttcatgtgcgcaatatagagtttattgtaaaaagc

SEQ ID NO: 120 - DNA, 4151 bp, Homo sapiens
gggacagggcactcttccccgccgtccacacaatgagtgttggccggaggaagctggccctgctctgggccctggctctcgctctggcctgcacccggcatacaggccatgcccaggatggctcctccgaatccagctacaagcaccaccctgccctctctcctatcgcccgggggcccatcggggtcccgctccgtggggcgactgtcttcccatctctgaggaccatccctgtggtacgagcctccaacccggcgcacaacgggcgggtgtgcagcacctggggcagcttccactacaagaccttcgacggcgacgtcttccgcttccccggcctctgcaactacgtgttctccgagcactgcggtgccgcctacgaggattttaacatcccagctacgccgcagccaggagtcagcggcccccacgctgagcagggtcctcatgaaggtggatggcgtggtcatccagctgaccaagggctccgtcctggtcaacggccacccggtcctgctgcccttcagccagtctggggtcctcattcagcaagagcagcagctacaccaaggtggaagccaggctgggccttgtcctcatgtggaaccacgatgacagcctgctgctggaagctggacaccaaatacgccaacaagaacctgtgggctctgtggggacttcaacgggatgcccgtggtcagcgagctcctctcccacaacaccaagctgacacccatggaattcgggaacctgccgaaagatggacgaacccacggagcagtgtcaggaccctgtccctgaacccccgaagaactgctccactggctttggcatcctgtgaggagctcctgcacggccagctgttctctggctgcgtggccctggtggacgtcggcagctacctggaggcttgcaggcaagacctctgcttctgtgaagacaccgacctgctcagctgcgtctgccacacccttgccgagtactcccggcagtgcacccatgcaggggggttgccccaggactggcggggccctgacttctgcccccagaagtgccccaacaacatgcagtaccacgagtgccgctccccctgcgcagacacctgctccaaccaggagcactcccgggcctgtgaggaccactgtgtggccggctgcttctgccctgaggggacggtgcttgacgacatcggccagaccggctgtgtccctgtgtcaaagtgtgcctgcgtctacaacggggctgcctatgccccaggggccacctactccacagactgcaccaactgcacctgctccggaggccggtggagctgccaggaagttccatgcccgggtacctgctctgtgcttggaggtgcccacttctcaacgtttgacgggaagcaatacacggtgcacggcgactgcagctatgtgctgaccaagccctgtgacagcagtgccttcactgtactggctgagctgcgcaggtgcgggctgacggacagcgagacctgcctgaagagcgtgacactgagcctggatggggcgcagacggtggtggtgatcaaggccagtggggaagtgttcctgaaccagatctacacccagctgcccatctctgcagccaacgtcaccatcttcagaccctcaaccttcttcatcatcgcccagaccagcctgggcctgcagctgaacctgcagctggtgcccaccatgcagctgttcatgcagctggcgcccaagctccgtgggcagacctgcggtctctgtgggaacttcaacagcatccaggccgatgacttccggaccctcagtggggtggtggaggccaccgctgcggccttcttcaacaccttcaagacccaggccgcctgccccaacatcaggaacagcttcgaggacccctgctctctgagcgtggagaatgagaagtatgctcagcactggtgctcgcagctgaccgatgccgacggccccttcggccggtgccatgctgccgtgaagccgggaacctactactcgaactgcatgtttgacacctgcaactgtgagcggagcgaggactgcctgtgcgccgcgctgtcctcctacgtgcacgcctgtgccgccaagggcgtgcagctcggcggctggagggacggcgtctgcacgaagcctatgaccacttgccccaagtcaatgacgtaccactaccatgtcagcacctgccagcccacctgccgctccctgagcgagggggacatcacctgcagtgttggcttcatccccgtggatggctgcatctgtcccaagggcaccttcctggacgacacgggcaagtgtgtgcaggccagcaactgtccctgctaccacagaggctccatgatccccaatggggagtcggtgcacgacagcggggctatctgcacctgcacacatgggaagctgagctgcatcggaggccaagcccccgccccagtgtgtgctgcgcccatggtgttctttgactgccgaaatgccacgcccggggacacaggggctggctgtcagaagagctgccacacactggacatgacctgttacagcccccaatgtgtgcctggctgcgtgtgccccgacgggctggtggcggacggcgagggcggctgcatcactgcggaggactgcccctgcgtgcacaatgaggccagctaccgggccggccagaccatccgggtgggctgcaacacctgcacctgtgacagcaggatgtggcggtgcacagatgacccctgcctggccacctgcgccgtgtacggggacggccactacctcaccttcgacggacagagctacagcttcaacgaggagactgcgagtactcgctggtgcagaaccgctgtggcgggaaagacagcacccaggactcctttcgtgttgtcaccgagaacgtcccctgcggcaccacagggaccacctgctccaaggccatcaagattttcctgggggaacttcgagctgaagctaagccatgggaaggtggaggtgatcgggacggacgagagccaggaggtgccatacaccatccggcagatgggcatctacctggtggtggacaccgacattggcctggtgctgctgtgggacaagaagaccagcatcttcatcaacctcagccccgagttcaagggcagggtctgcggcctgtgtgggaacttcgacgacatcgccgttaatgactttgccacgcggagccggtctgtggtgggggacgtgctggagtttgggaacagctggaagctctccccctcctgcccagatgccctggcgcccaaggacccctgcacggccaaccccttccgcaagtcctgggcccagaagcagtgcagcatcctccacggccccaccttcgccgcctgccacgcacacgtggagccggccaggtactacgaggcctgcgtgaacgacgcgtgcgcctgcgactccgggggtgactgcgagtgcttctgcacggctgtggcccgctacgcccaggcctgccatgaagtaggcacctgtgtgtgtctgcggaccccaagcatctgccctctgttctgcgactactacaaccccgaaggccagtgcgagtggcactaccagccctgcggggtgccctgcctgcgcacctgccggaacccccgtggagactgcctgcgggacgtccggggcctggaaggctgctaccccaagtgcccaccagaggctcccatctttgatgaggacaagatgcagtgtgtggccacctgcccaaccccgcctctgccaccacggtgccacgtccatgggaagtcctaccggccaggtgcagtggtgccctcggacaagaactgccagtcctgcctttgtacggagcgcggcgtggagtgcacctacaaagctgaggcctgtgtctgcacctacaatggacagcgcttccacccaggggacgtcatctaccacacgacggatggcacgggtggctgcatctccgcccgctgcggggccaacggcaccattgagaggagggtctacccctgcagccccaccacccctgtccccccaaccaccttctccttctccacacccccgcttgtcgtgagctccacgcacacccccagcaatggcccaagcagcgcgcacacaggccctccgagcagcgcctggcccaccacagcaggcacttctcccaggacg

SEQ ID NO: 121 - DNA, 880 bp, Homo sapiens
tccagcactttgctcgggtcacggcctcctcctggctcccaggaccccaccataggcagaggcaggccttcctacaccctactccctgtgcctccaggctcgactagtccctagcactcgacgactgagtctctgagatcacttcaccgtggtctccgcctcacccttggcgctggaccagtgagaggagagggctggggcgctccgctgagccactcctgcgcccccctggccttgtctacctcttgccccccgaagggttagtgtcgagctcaccccagcatcctacaacctcctggtggccttgccgcccccacaaccccgaggtataaagccaggtacacgaggcaggggacgcaccaaggatggagatgttccaggggctgctgctgttgctgctgctgagcatgggcgggacatgggcatccaaggagccgcttcggccacggtgccgccccatcaatgccaccctggctgtggagaaggagggctgccccgtgtgcatcaccgtcaacaccaccatctgtgccggctactgccccaccatgacccgcgtgctgcagggggtcctgccggccctgcctcaggtggtgtgcaactaccgcgatgtgcgcttcgagtccatccggctccctggctgcccgcgcggcgtgaaccccgtggtctcctacgccgtggctctcagctgtcaatgtgcactctgccgccgcagcaccactgactgcgggggtcccaaggaccaccccttgacctgtgatgacccccgcttccaggactcctcttcctcaaaggcccctccccccagccttccaagtccatcccgactcccggggccctcggacaccccgatcctcccacaataaaggcttctcaatccgca

SEQ ID NO: 122 - DNA, 5532 bp, Homo sapiens
gccgcgctgcgccggagtcccgagctagccccggcgccgccgccgcccagaccggacgacaggccacctcgtcggcgtccgcccgagtccccgcctcgccgccaacgccacaaccaccgcgcacggccccctgactccgtccagtattgatcgggagagccggagcgagctcttcggggagcagcgatgcgaccctccgggacggccggggcagcgctcctggcgctgctggctgcgctctgcccggcgagtcgggctctggaggaaaagaaagtttgccaaggcacgagtaacaagctcacgcagttgggcacttttgaagatcattttctcagcctccagaggatgttcaataactgtgaggtggtccttgggaatttggaaattacctatgtgcagaggaattatgatctttccttcttaaagaccatccaggaggtggctggttatgtcctcattgccctcaacacagtggagcgaattcctttggaaaacctgcagatcatcagaggaaatatgtactacgaaaattcctatgccttagcagtcttatctaactatgatgcaaataaaaccggactgaaggagctgcccatgagaaatttacaggaaatcctgcatggcgccgtgcggttcagcaacaaccctgccctgtgcaacgtggagagcatccagtggcgggacatagtcagcagtgactttctcagcaacatgtcgatggacttccagaaccacctgggcagctgccaaaagtgtgatccaagctgtcccaatgggagctgctggggtgcaggagaggagaactgccagaaactgaccaaaatcatctgtgcccagcagtgctccgggcgctgccgtggcaagtcccccagtgactgctgccacaaccagtgtgctgcaggctgcacaggcccccgggagagcgactgcctggtctgccgcaaattccgagacgaagccacgtgcaaggacacctgccccccactcatgctctacaaccccaccacgtaccagatggatgtgaaccccgagggcaaatacagctttggtgccacctgcgtgaagaagtgtccccgtaattatgtggtgacagatcacggctcgtgcgtccgagcctgtggggccgacagctatgagatggaggaagacggcgtccgcaagtgtaagaagtgcgaagggccttgccgcaaagtgtgtaacggaataggtattggtgaatttaaagactcactctccataaatgctacgaatattaaacacttcaaaaactgcacctccatcagtggcgatctccacatcctgccggtggcatttaggggtgactccttcacacatactcctcctctggatccacaggaactggatattctgaaaaccgtaaaggaaatcacagggtttttgctgattcaggcttggcctgaaaacaggacggacctccatgcctttgagaacctagaaatcatacgcggcaggaccaagcaacatggtcagttttctcttgcagtcgtcagcctgaacataacatccttgggattacgctccctcaaggagataagtgatggagatgtgataatttcaggaaacaaaaatttgtgctatgcaaatacaataaactggaaaaaactgtttgggacctccggtcagaaaaccaaaattataagcaacagaggtgaaaacagctgcaaggccacaggccaggtctgccatgccttgtgctcccccgagggctgctggggcccggagcccagggactgcgtctcttgccggaatgtcagccgaggcagggaatgcgtggacaagtgcaagcttctggagggtgagccaagggagtttgtggagaactctgagtgcatacagtgccacccagagtgcctgcctcaggccatgaacatcacctgcacaggacggggaccagacaactgtatccagtgtgcccactacattgacggcccccactgcgtcaagacctgcccggcaggagtcatgggagaaaacaacaccctggtctggaagtacgcagacgccggccatgtgtgccacctgtgccatccaaactgcacctacggatgcactgggccaggtcttgaaggctgtccaacgaatgggcctaagatcccgtccatcgccactgggatggtgggggccctcctcttgctgctggtggtggccctggggatcggcctcttcatgcgaaggcgccacatcgttcggaagcgcacgctgcggaggctgctgcaggagagggagcttgtggagcctcttacacccagtggagaagctcccaaccaagctctcttgaggatcttgaaggaaactgaattcaaaaagatcaaagtgctgggctccggtgcgttcggcacggtgtataagggactctggatcccagaaggtgagaaagttaaaattcccgtcgctatcaaggaattaagagaagcaacatctccgaaagccaacaaggaaatcctcgatgaagcctacgtgatggccagcgtggacaacccccacgtgtgccgcctgctgggcatctgcctcacctccaccgtgcaactcatcacgcagctcatgcccttcggctgcctcctggactatgtccgggaacacaaagacaatattggctcccagtacctgctcaactggtgtgtgcagatcgcaaagggcatgaactacttggaggaccgtcgcttggtgcaccgcgacctggcagccaggaacgtactggtgaaaacaccgcagcatgtcaagatcacagattttgggctggccaaactgctgggtgcggaagagaaagaataccatgcagaaggaggcaaagtgcctatcaagtggatggcattggaatcaattttacacagaatctatacccaccagagtgatgtctggagctacggggtgaccgtttgggagttgatgacctttggatccaagccatatgacggaatccctgccagcgagatctcctccatcctggagaaaggagaacgcctccctcagccacccatatgtaccatcgatgtctacatgatcatggtcaagtgctggatgatagacgcagatagtcgcccaaagttccgtgagttgatcatcgaattctccaaaatggcccgagacccccagcgctaccttgtcattcagggggatgaaagaatgcatttgccaagtcctacagactccaacttctaccgtgccctgatggatgaagaagacatggacgacgtggtggatgccgacgagtacctcatcccacagcagggcttcttcagcagcccctccacgtcacggactcccctcctgagctctctgagtgcaaccagcaacaattccaccgtggcttgcattgatagaaatgggctgcaaagctgtcccatcaaggaagacagcttcttgcagcgatacagctcagaccccacaggcgccttgactgaggacagcatagacgacaccttcctcccagtgcctgaatacataaaccagtccgttcccaaaaggcccgctggctctgtgcagaatcctgtctatcacaatcagcctctgaaccccgcgcccagcagagacccacactaccaggacccccacagcactgcagtgggcaaccccgagtatctcaacactgtccagcccacctgtgtcaacagcacattcgacagccctgcccactgggcccagaaaggcagccaccaaattagcctggacaaccctgactaccagcaggacttctttcccaaggaagccaagccaaatggcatctttaagggctccacagctgaaaatgcagaatacctaagggtcgcgccacaaagcagtgaatttattggagcatgaccacggaggatagtatgagccctaaaaatccagactctttcgatacccaggaccaagccacagcaggtcctccatcccaacagccatgcccgcattagctcttagacccacagactggttttgcaacgtttacaccgactagccaggaagtacttccacctcgggcacattttgggaagttgcattcctttgtcttcaaactgtgaagcatttacagaaacgcatccagcaagaatattgtccctttgagcagaaatttatctttcaaagaggtatatttgaaaaaaaaaaaaaaagtatatgtgaggatttttattgattggggatcttggagtttttcattgtcgctattgatttttacttcaatgggctcttccaacaaggaagaagcttgctggtagcacttgctaccctgagttcatccaggcccaactgtgagcaaggagcacaagccacaagtcttccagaggatgcttgattccagtggttctgcttcaaggcttccactgcaaaacactaaagatccaagaaggccttcatggccccagcaggccggatcggtactgtatcaagtcatggcaggtacagtaggataagccactctgtcccttcctgggcaaagaagaaacggaggggatgaattcttccttagacttacttttgtaaaaatgtccccacggtacttactccccactgatggaccagtggtttccagtcatgagcgttagactgacttgtttgtcttccattccattgttttgaaactcagtatgccgcccctgtcttgctgtcatgaaatcagcaagagaggatgacacatcaaataataactcggattccagcccacattggattcatcagcatttggaccaatagcccacagctgagaatgtggaatacctaaggataacaccgcttttgttctcgcaaaaacgtatctcctaatttgaggctcagatgaaatgcatcaggtcctttggggcatagatcagaagactacaaaaatgaagctgctctgaaatctcctttagccatcaccccaaccccccaaaattagtttgtgttacttatggaagatagttttctccttttacttcacttcaaaagctttttactcaaagagtatatgttccctccaggtcagctgcccccaaaccccctccttacgctttgtcacacaaaaagtgtctctgccttgagtcatctattcaagcacttacagctctggccacaacagggcattttacaggtgcgaatgacagtagcattatgagtagtgtgaattcaggtagtaaatatgaaactagggtttgaaattgataatgctttcacaacatttgcagatgttttagaaggaaaaaagttccttcctaaaataatttctctacaattggaagattggaagattcagctagttaggagcccattttttcctaatctgtgtgtgccctgtaacctgactggttaacagcagtcctttgtaaacagtgttttaaactctcctagtcaatatccaccccatccaatttatcaaggaagaaatggttcagaaaatattttcagcctacagttatgttcagtcacacacacatacaaaatgttccttttgcttttaaagtaatttttgactcccagatcagtcagagcccctacagcattgttaagaaagtatttgatttttgtctcaatgaaaataaaactatattcatttcc

SEQ ID NO: 123 - DNA, 4530 bp, Homo sapiens
aattctcgagctcgtcgaccggtcgacgagctcgagggtcgacgagctcgagggcgcgcgcccggcccccacccctcgcagcaccccgcgccccgcgccctcccagccgggtccagccggagccatggggccggagccgcagtgagcaccatggagctggcggccttgtgccgctgggggctcctcctcgccctcttgccccccggagccgcgagcacccaagtgtgcaccggcacagacatgaagctgcggctccctgccagtcccgagacccacctggacatgctccgccacctctaccagggctgccaggtggtgcagggaaacctggaactcacctacctgcccaccaatgccagcctgtccttcctgcaggatatccaggaggtgcagggctacgtgctcatcgctcacaaccaagtgaggcaggtcccactgcagaggctgcggattgtgcgaggcacccagctctttgaggacaactatgccctggccgtgctagacaatggagacccgctgaacaataccacccctgtcacaggggcctccccaggaggcctgcgggagctgcagcttcgaagcctcacagagatcttgaaaggaggggtcttgatccagcggaacccccagctctgctaccaggacacgattttgtggaaggacatcttccacaagaacaaccagctggctctcacactgatagacaccaaccgctctcgggcctgccacccctgttctccgatgtgtaagggctcccgctgctggggagagagttctgaggattgtcagagcctgacgcgcactgtctgtgccggtggctgtgcccgctgcaaggggccactgcccactgactgctgccatgagcagtgtgctgccggctgcacgggccccaagcactctgactgcctggcctgcctccacttcaaccacagtggcatctgtgagctgcactgcccagccctggtcacctacaacacagacacgtttgagtccatgcccaatcccgagggccggtatacattcggcgccagctgtgtgactgcctgtccctacaactacctttctacggacgtgggatcctgcaccctcgtctgccccctgcacaaccaagaggtgacagcagaggatggaacacagcggtgtgagaagtgcagcaagccctgtgcccgagtgtgctatggtctgggcatggagcacttgcgagaggtgagggcagttaccagtgccaatatccaggagtttgctggctgcaagaagatctttgggagcctggcatttctgccggagagctttgatggggacccagcctccaacactgccccgctccagccagagcagctccaagtgtttgagactctggaagagatcacaggttacctatacatctcagcatggccggacagcctgcctgacctcagcgtcttccagaacctgcaagtaatccggggacgaattctgcacaatggcgcctactcgctgaccctgcaagggctgggcatcagctggctggggctgcgctcactgagggaactgggcagtggactggccctcatccaccataacacccacctctgcttcgtgcacacggtgccctgggaccagctctttcggaacccgcaccaagctctgctccacactgccaaccggccagaggacgagtgtgtgggcgagggcctggcctgccaccagctgtgcgcccgagggcactgctggggtccagggcccacccagtgtgtcaactgcagccagttccttcggggccaggagtgcgtggaggaatgccgagtactgcaggggctccccagggagtatgtgaatgccaggcactgtttgccgtgccaccctgagtgtcagccccagaatggctcagtgacctgttttggaccggaggctgaccagtgtgtggcctgtgcccactataaggaccctcccttctgcgtggcccgctgccccagcggtgtgaaacctgacctctcctacatgcccatctggaagtttccagatgaggagggcgcatgccagccttgccccatcaactgcacccactcctgtgtggacctggatgacaagggctgccccgccgagcagagagccagccctctgacgtccatcgtctctgcggtggttggcattctgctggtcgtggtcttgggggtggtctttgggatcctcatcaagcgacggcagcagaagatccggaagtacacgatgcggagactgctgcaggaaacggagctggtggagccgctgacacctagcggagcgatgcccaaccaggcgcagatgcggatcctgaaagagacggagctgaggaaggtgaaggtgcttggatctggcgcttttggcacagtctacaagggcatctggatccctgatggggagaatgtgaaaattccagtggccatcaaagtgttgagggaaaacacatcccccaaagccaacaaagaaatcttagacgaagcatacgtgatggctggtgtgggctccccatatgtctcccgccttctgggcatctgcctgacatccacggtgcagctggtgacacagcttatgccctatggctgcctcttagaccatgtccgggaaaaccgcggacgcctgggctcccaggacctgctgaactggtgtatgcagattgccaaggggatgagctacctggaggatgtgcggctcgtacacagggacttggccgctcggaacgtgctggtcaagagtcccaaccatgtcaaaattacagacttcgggctggctcggctgctggacattgacgagacagagtaccatgcagatgggggcaaggtgcccatcaagtggatggcgctggagtccattctccgccggcggttcacccaccagagtgatgtgtggagttatggtgtgactgtgtgggagctgatgacttttggggccaaaccttacgatgggatcccagcccgggagatccctgacctgctggaaaagggggagcggctgccccagccccccatctgcaccattgatgtctacatgatcatggtcaaatgttggatgattgactctgaatgtcggccaagattccgggagttggtgtctgaattctcccgcatggccagggacccccagcgctttgtggtcatccagaatgaggacttgggcccagccagtcccttggacagcaccttctaccgctcactgctggaggacgatgacatgggggacctggtggatgctgaggagtatctggtaccccagcagggcttcttctgtccagaccctgccccgggcgctgggggcatggtccaccacaggcaccgcagctcatctaccaggagtggcggtggggacctgacactagggctggagccctctgaagaggaggcccccaggtctccactggcaccctccgaaggggctggctccgatgtatttgatggtgacctgggaatgggggcagccaaggggctgcaaagcctccccacacatgaccccagccctctacagcggtacagtgaggaccccacagtacccctgccctctgagactgatggctacgttgcccccctgacctgcagcccccagcctgaatatgtgaaccagccagatgttcggccccagcccccttcgccccgagagggccctctgcctgctgcccgacctgctggtgccactctggaaagggccaagactctctccccagggaagaatggggtcgtcaaagacgtttttgcctttgggggtgccgtggagaaccccgagtacttgacaccccagggaggagctgcccctcagccccaccctcctcctgccttcagcccagccttcgacaacctctattactgggaccaggacccaccagagcggggggctccacccagcaccttcaaagggacacctacggcagagaacccagagtacctgggtctggacgtgccagtgtgaaccagaaggccaagtccgcagaagccctgatgtgtcctcagggagcagggaaggcctgacttctgctggcatcaagaggtgggagggccctccgaccacttccaggggaacctgccatgccaggaacctgtcctaaggaaccttccttcctgcttgagttcccagatggctggaaggggtccagcctcgttggaagaggaacagcactggggagtctttgtggattctgaggccctgcccaatgagactctagggtccagtggatgccacagcccagcttggccctttccttccagatcctgggtactgaaagccttagggaagctggcctgagaggggaagcggccctaagggagtgtctaagaacaaaagcgacccattcagagactgtccctgaaacctagtactgccccccatgaggaaggaacagcaatggtgtcagtatccaggctttgtacagagtgcttttctgtttagtttttactttttttgttttgtttttttaaagacgaaataaagacccaggggagaatgggtgttgtatggggaggcaagtgtggggggtccttctccacacccactttgtccatttgcaaatatattttggaaaac

SEQ ID NO: 124 - DNA, 801 bp, Homo sapiens
caccgcaccctcggactgccccaaggcccccgccgccgctccagcgccgcgcagccaccgccgccgccgccgcctctccttagtcgccgccatgacgaccgcgtccacctcgcaggtgcgccagaactaccaccaggactcagaggccgccatcaaccgccagatcaacctggagctctacgcctcctacgtttacctgtccatgtcttactactttgaccgcgatgatgtggctttgaagaactttgccaaatactttcttcaccaatctcatgaggagagggaacatgctgagaaactgatgaagctgcagaaccaacgaggtggccgaatcttccttcaggatatcaagaaaccagactgtgatgactgggagagcgggctgaatgcaatggagtgtgcattacatttggaaaaaaatgtgaatcagtcactactggaactgcacaaactggccactgacaaaaatgacccccatttgtgtgacttcattgagacacattacctgaatgagcaggtgaaagccatcaaagaattgggtgaccacgtgaccaacttgcgcaagatgggagcgcccgaatctggcttggcggaatatctctttgacaagcacacctgggagacagtgataatgaaagctaagcctcgggctaatttcccatagccgtggggtgacttcctggtcaccaaggcagtgcatgcatgttggggtttcctttaccttttctataagttgtaccaaaacatccacttaagttctttgatttgtaccattccttcaaataaagaaatttggtaccc

SEQ ID NO: 125 - DNA, 878 bp, Homo sapiens
gtcccgcgggtctgtctcttgcttcaacagtgtttggacggaacagatccggggactctcttccagcctccgaccgccctccgatttcctctccgcttgcaacctccgggaccatcttctcggccatctcctgcttctgggacctgccagcaccgtttttgtggttagctccttcttgccaaccaaccatgagctcccagattcgtcagaattattccaccgacgtggaggcagccgtcaacagcctggtcaatttgtacctgcaggcctcctacacctacctctctctgggcttctatttcgaccgcgatgatgtggctctggaaggcgtgagccacttcttccgcgaattggccgaggagaagcgcgagggctacgagcgtctcctgaagatgcaaaaccagcgtggcggccgcgctctcttccaggacatcaagaagccagctgaagatgagtggggtaaaaccccagacgccatgaaagctgccatggccctggagaaaaagctgaaccaggcccttttggatcttcatgccctgggttctgcccgcacggacccccatctctgtgacttcctggagactcacttcctagatgaggaagtgaagcttatcaagaagatgggtgaccacctgaccaacctccacaggctgggtggcccggaggctgggctgggcgagtatctcttcgaaaggctcactctcaagcacgactaagagccttctgagcccagcgacttctgaagggccccttgcaaagtaatagggcttctgcctaagcctctccctccagccaataggcagctttcttaactatcctaacaagccttggaccaaatggaaataaagctttttgatgcaaaaaaaaaaaaaaaaaaa

SEQ ID NO: 126 - DNA, 2747 bp, Homo sapiens
catactccatgcccagaattcctgcctcgccactgtcctgctgccctccagacatgctggggccctgcatgctgctgctgctgctgctgctgggcctgaggctacagctctccctgggcatcatcctagttgaggaggagaacccggacttctggaaccgcgaggcagccgaggccctgggtgccgccaagaagctgcagcctgcacagacagccgccaagaacctcatcatcttcctgggcgatgggatgggggtgtctacggtgacagctgccaggatcctaaaagggcagaagaaggacaaactggggcctgagatacccctggccatggaccgcttcccatatgtggctctgtccaagacatacaatgtagacaaacatgtgccagacagtggagccacagccacggcctacctgtgcggggtcaagggcaacttccagaccattggcttgagtgcagccgcccgctttaaccagtgcaacacgacacgcggcaacgaggtcatctccgtgatgaatcgggccaagaaagcagggaagtcagtgggagtggtaaccaccacacgagtgcagcacgcctcgccagccggcacctacgcccacacggtgaaccgcaactggtactcggacgccgacgtgcctgcctcggcccgccaggaggggtgccaggacatcgctacgcagctcatctccaacatggacattgacgtgatcctaggtgggggccgaaagtacatgtttcgcatgggaaccccagaccctgagtacccagatgactacagccaaggtgggaccaggctggacgggaagaatctggtgcaggaatggctggcgaagcgccagggtgcccggtacgtgtggaaccgcactgagctcatgcaggcttccctggacccgtctgtggcccatctcatgggtctctttgagcctggagacatgaaatacgagatccaccgagactccacactggacccctccctgatggagatgacagaggctgccctgcgcctgctgagcaggaacccccgcggcttcttcctcttcgtggagggtggtcgcatcgaccatggtcatcatgaaagcagggcttaccgggcactgactgagacgatcatgttcgacgacgccattgagagggcgggccagctcaccagcgaggaggacacgctgagcctcgtcactgccgaccactcccacgtcttctccttcggaggctaccccctgcgagggagctccatcttcgggctggcccctggcaaggcccgggacaggaaggcctacacggtcctcctatacggaaacggtccaggctatgtgctcaaggacggcgcccggccggatgttaccgagagcgagagcgggagccccgagtatcggcagcagtcagcagtgcccctggacgaagagacccacgcaggcgaggacgtggcggtgttcgcgcgcggcccgcaggcgcacctggttcacggcgtgcaggagcagaccttcatagcgcacgtcatggccttcgccgcctgcctggagccctacaccgcctgcgacctggcgccccccgccggcaccaccgacgccgcgcacccggggcggtccgtggtccccgcgttgcttcctctgctggccgggaccctgctgctgctggagacggccactgctccctgagtgtcccgtccctggggctcctgcttccccatcccggagttctcctgctccccgcctcctgtcgtcctgcctggcctccagcccgagtcgtcatccccggagtccctatacagaggtcctgccatggaaccttcccctccccgtgcgctctggggactgagcccatgacaccaaacctgccccttggctgctctcggactccctaccccaaccccagggactgcaggttgtgccctgtggctgcctgcaccccaggaaaggagggggctcaggccatccagccaccacctacagcccagtgggtaccaggcaggctcccttcctggggaaaagaagcacccagaccccgcgccccgctgatctttgcttcagtccttgaatcacctgtgggacttgaggactcgggatcttcaggacgcctggagaagggtggtttcctgccaccctgctggccaaggaggctcctggggtggggatcaccagggggattttgacacagccttcggctgccccccactaagttaattccacacccctgtaccccccagggggccctctgcctcatggcaaaggcttgccccaaatctcaacttctcagacgttccatacccccacatgccaatttcagcacccaactgagatccgaggagctcctgggaagccctgggtgcaggacactggtcgagagccaaaggtccctccccagacatctggacactgggcatagatttctcaagaaggaagactcccctgcctccccagggcctctgctctcctgggagacaaagcaataataaaaggaagtgtttgtaatcccagcactttgggaggccgaggtgggcggatcacgaggtcaggagatggagaccatcctggctaacacggtgaaaccccttatctatgcgcctgtagtcccagctacccaggaggctgaagcaggataatcgcttgaacccgggcggcggagattgcagtgagccgaggtcatgccactgcactgcagcctgggcgacagagcgagattctgcctcaaaaataaacaaataaattttaaaaataaataaataataaaaggaagtgttagac

SEQ ID NO: 127 - DNA, 2062 bp, Homo sapiens
gtcagtccctcctgtagccgccgccgccgccgcccgccgcccctctgccagcagctccggcgccacctcgggccggcgtctccggcgggcgggagccaggcgctgacgggcgcggcgggggcggccgagcgctcctgcggctgcgactcaggctccggcgtctgcgcttccccatggggctggcctgcggcgcctgggcgctctgagattgtcactgctgttccaagggcacacgcagagggatttggaattcctggagagttgcctttgtgagaagctggaaatatttctttcaattccatctcttagttttccataggaacatcaagaaatcatgaacaactttggtaatgaagagtttgactgccacttcctcgatgaaggttttactgccaaggacattctggaccagaaaattaatgaagtttcttcttctgatgataaggatgccttctatgtggcagacctgggagacattctaaagaaacatctgaggtggttaaaagctctccctcgtgtcacccccttttatgcagtcaaatgtaatgatagcaaagccatcgtgaagacccttgctgctaccgggacaggatttgactgtgctagcaagactgaaatacagttggtgcagagtctgggggtgcctccagagaggattatctatgcaaatccttgtaaacaagtatctcaaattaagtatgctgctaataatggagtccagatgatgacttttgatagtgaagttgagttgatgaaagttgccagagcacatcccaaagcaaagttggttttgcggattgccactgatgattccaaagcagtctgtcgtctcagtgtgaaattcggtgccacgctcagaaccagcaggctccttttggaacgggcgaaagagctaaatatcgatgttgttggtgtcagcttccatgtaggaagcggctgtaccgatcctgagaccttcgtgcaggcaatctctgatgcccgctgtgtttttgacatgggggctgaggttggtttcagcatgtatctgcttgatattggcggtggctttcctggatctgaggatgtgaaacttaaatttgaagagatcaccggcgtaatcaacccagcgttggacaaatactttccgtcagactctggagtgagaatcatagctgagcccggcagatactatgttgcatcagctttcacgcttgcagttaatatcattgccaagaaaattgtattaaaggaacagacgggctctgatgacgaagatgagtcgagtgagcagacctttatgtattatgtgaatgatggcgtctatggatcatttaattgcatactctatgaccacgcacatgtaaagccccttctgcaaaagagacctaaaccagatgagaagtattattcatccagcatatggggaccaacatgtgatggcctcgatcggattgttgagcgctgtgacctgcctgaaatgcatgtgggtgattggatgctctttgaaaacatgggcgcttacactgttgctgctgcctctacgttcaatggcttccagaggccgacgatctactatgtgatgtcagggcctgcgtggcaactcatgcagcaattccagaaccccgacttcccacccgaagtagaggaacaggatgccagcaccctgcctgtgtcttgtgcctgggagagtgggatgaaacgccacagagcagcctgtgcttcggctagtattaatgtgtagatagcactctggtagctgttaactgcaagtttagcttgaattaagggatttggggggaccatgtaacttaattactgctagttttgaaatgtctttgtaagagtagggtcgccatgatgcagccatatggaagactaggatatgggtcacacttatctgtgttcctatggaaactatttgaatatttgttttatatggatttttattcactcttcagacacgctactcaagagtgcccctcagctgctgaacaagcatttgtagcttgtacaatggcagaatgggccaaaagcttagtgttgtgacctgtttttaaaataaagtatcttgaaataattaggc

SEQ ID NO: 128 - DNA, 3557 bp, Homo sapiens
gagagggtccttcagggtctgcttatgcccttgttcaagaacaccagtgtcagctctctgtactctggttgcagactgaccttgctcaggcctgagaaggatggggcagccaccagagtggatgctgtctgcacccatcgtcctgaccccaaaagccctggactggacagagagcggctgtactggaagctgagccagctgacccacggcatcactgagctgggcccctacaccctggacaggcacagtctctatgtcaatggtttcacccatcagagctctatgacgaccaccagaactcctgatacctccacaatgcacctggcaacctcgagaactccagcctccctgtctggacctacgaccgccagccctctcctggtgctattcacaattaacttcaccatcactaacctgcggtatgaggagaacatgcatcaccctggctctagaaagtttaacaccacggagagagtccttcagggtctgctcaggcctgtgttcaagaacaccagtgttggccctctgtactctggctgcagactgaccttgctcaggcccaagaaggatggggcagccaccaaagtggatgccatctgcacctaccgccctgatcccaaaagccctggactggacagagagcagctatactgggagctgagccagctaacccacagcatcactgagctgggcccctacaccctggacagggacagtctctatgtcaatggtttcacacagcggagctctgtgcccaccactagcattcctgggacccccacagtggacctgggaacatctgggactccagtttctaaacctggtccctcggctgccagccctctcctggtgctattcactctcaacttcaccatcaccaacctgcggtatgaggagaacatgcagcaccctggctccaggaagttcaacaccacggagagggtccttcagggcctgctcaggtccctgttcaagagcaccagtgttggccctctgtactctggctgcagactgactttgctcaggcctgaaaaggatgggacagccactggagtggatgccatctgcacccaccaccctgaccccaaaagccctaggctggacagagagcagctgtattgggagctgagccagctgacccacaatatcactgagctgggccactatgccctggacaacgacagcctctttgtcaatggtttcactcatcggagctctgtgtccaccaccagcactcctgggacccccacagtgtatctgggagcatctaagactccagcctcgatatttggcccttcagctgccagccatctcctgatactattcaccctcaacttcaccatcactaacctgcggtatgaggagaacatgtggcctggctccaggaagttcaacactacagagagggtccttcagggcctgctaaggcccttgttcaagaacaccagtgttggccctctgtactctggctccaggctgaccttgctcaggccagagaaagatggggaagccaccggagtggatgccatctgcacccaccgccctgaccccacaggccctgggctggacagagagcagctgtatttggagctgagccagctgacccacagcatcactgagctgggcccctacacactggacagggacagtctctatgtcaatggtttcacccatcggagctctgtacccaccaccagcaccggggtggtcagcgaggagccattcacactgaacttcaccatcaacaacctgcgctacatggcggacatgggccaacccggctccctcaagttcaacatcacagacaacgtcatgaagcacctgctcagtcctttgttccagaggagcagcctgggtgcacggtacacaggctgcagggtcatcgcactaaggtctgtgaagaacggtgctgagacacgggtggacctcctctgcacctacctgcagcccctcagcggcccaggtctgcctatcaagcaggtgttccatgagctgagccagcagacccatggcatcacccggctgggcccctactctctggacaaagacagcctctaccttaacggttacaatgaacctggtctagatgagcctcctacaactcccaagccagccaccacattcctgcctcctctgtcagaagccacaacagccatggggtaccacctgaagaccctcacactcaacttcaccatctccaatctccagtattcaccagatatgggcaagggctcagctacattcaactccaccgagggggtccttcagcacctgctcagacccttgttccagaagagcagcatgggccccttctacttgggttgccaactgatctccctcaggcctgagaaggatggggcagccactggtgtggacaccacctgcacctaccaccctgaccctgtgggccccgggctggacatacagcagctttactgggagctgagtcagctgacccatggtgtcacccaactgggcttctatgtcctggacagggatagcctcttcatcaatggctatgcaccccagaatttatcaatccggggcgagtaccagataaatttccacattgtcaactggaacctcagtaatccagaccccacatcctcagagtacatcaccctgctgagggacatccaggacaaggtcaccacactctacaaaggcagtcaactacatgacacattccgcttctgcctggtcaccaacttgacgatggactccgtgttggtcactgtcaaggcattgttctcctccaatttggaccccagcctggtggagcaagtctttctagataagaccctgaatgcctcattccattggctgggctccacctaccagttggtggacatccatgtgacagaaatggagtcatcagtttatcaaccaacaagcagctccagcacccagcacttctacccgaatttcaccatcaccaacctaccatattcccaggacaaagcccagccaggcaccaccaattaccagaggaacaaaaggaatattgaggatgcgctcaaccaactcttccgaaacagcagcatcaagagttatttttctgactgtcaagtttcaacattcaggtctgtccccaacaggcaccacaccggggtggactccctgtgtaacttctcgccactggctcggagagtagacagagttgccatctatgaggaatttctgcggatgacccggaatggtacccagctgcagaacttcaccctggacaggagcagtgtccttgtggatgggtattctcccaacagaaatgagcccttaactgggaattctgaccttcccttctgggctgtcatcttcatcggcttggcaggactcctgggactcatcacatgcctgatctgcggtgtcctggtgaccacccgccggcggaagaaggaaggagaatacaacgtccagcaacagtgcccaggctactaccagtcacacctagacctggaggatctgcaatgactggaacttgccggtgcctggggtgcctttcccccagccagggtccaaagaagcttggctggggcagaaataaaccatattggtcg

SEQ ID NO: 129 - DNA, 3464 bp, Homo sapiens
cagccgtgctcgaagcgttcctggagcccaagctctcctccacaggtgaagacagggccagcaggagacaccatggggcacctctcagccccacttcacagagtgcgtgtaccctggcaggggcttctgctcacagcctcacttctaaccttctggaacccgcccaccactgcccagctcactactgaatccatgccattcaatgttgcagaggggaaggaggttcttctccttgtccacaatctgccccagcaactttttggctacagctggtacaaaggggaaagagtggatggcaaccgtcaaattgtaggatatgcaataggaactcaacaagctaccccagggcccgcaaacagcggtcgagagacaatataccccaatgcatccctgctgatccagaacgtcacccagaatgacacaggattctacaccctacaagtcataaagtcagatcttgtgaatgaagaagcaactggacagttccatgtatacccggagctgcccaagccctccatctccagcaacaactccaaccctgtggaggacaaggatgctgtggccttcacctgtgaacctgagactcaggacacaacctacctgtggtggataaacaatcagagcctcccggtcagtcccaggctgcagctgtccaatggcaacaggaccctcactctactcagtgtcacaaggaatgacacaggaccctatgagtgtgaaatacagaacccagtgagtgcgaaccgcagtgacccagtcaccttgaatgtcacctatggcccggacacccccaccatttccccttcagacacctattaccgtccaggggcaaacctcagcctctcctgctatgcagcctctaacccacctgcacagtactcctggcttatcaatggaacattccagcaaagcacacaagagctctttatccctaacatcactgtgaataatagtggatcctatacctgccacgccaataactcagtcactggctgcaacaggaccacagtcaagacgatcatagtcactgagctaagtccagtagtagcaaagccccaaatcaaagccagcaagaccacagtcacaggagataaggactctgtgaacctgacctgctccacaaatgacactggaatctccatccgttggttcttcaaaaaccagagtctcccgtcctcggagaggatgaagctgtcccagggcaacaccaccctcagcataaaccctgtcaagagggaggatgctgggacgtattggtgtgaggtcttcaacccaatcagtaagaaccaaagcgaccccatcatgctgaacgtaaactataatgctctaccacaagaaaatggcctctcacctggggccattgctggcattgtgattggagtagtggccctggttgctctgatagcagtagccctggcatgttttctgcatttcgggaagaccggcagggcaagcgaccagcgtgatctcacagagcacaaaccctcagtctccaaccacactcaggaccactccaatgacccacctaacaagatgaatgaagttacttattctaccctgaactttgaagcccagcaacccacacaaccaacttcagcctccccatccctaacagccacagaaataatttattcagaagtaaaaaagcagtaatgaaacctgtcctgctcactgcagtgctgatgtatttcaagtctctcaccctcatcactaggagattcctttcccctctagggtagaggggtggggacagaaacaactttctcctactcttccttcctaataggcatctccaggctgcctggtcactgcccctctctcagtgtcaatagatgaaagtacattgggagtctgtaggaaacccaaccttcttgtcattgaaatttggcaaagctgactttgggaaagagggaccagaacttcccctcccttccccttttcccaacctggacttgttttaaacttgcctgttcagagcactcattccttcccacccccagtcctgtcctatcactctaattcggatttgccatagccttgaggttatgtccttttccattaagtacatgtgccaggaaacagcgagagagagaaagtaaacggcagtaatgcttctcctatttctccaaagccttgtgtgaactagcaaagagaagaaaaccaaatatataaccaatagtgaaatgccacaggtttgtccactgtcagggttgtctacctgtaggatcagggtctaagcaccttggtgcttagctagaataccacctaatccttctggcaagcctgtcttcagagaacccactagaagcaactaggaaaaatcacttgccaaaatccaaggcaattcctgatggaaaatgcaaaagcacatatatgttttaatatctttatgggctctgttcaaggcagtgctgagagggaggggttatagcttcaggagggaaccagcttctgataaacacaatctgctaggaacttgggaaaggaatcagagagctgcccttcagcgattatttaaattattgttaaagaatacacaatttggggtattgggatttttctccttttctctgagacattccaccattttaatttttgtaactgcttatttatgtgaaaagggttatttttacttagcttagctatgtcagccaatccgattgccttaggtgaaagaaaccaccgaaatccctcaggtcccttggtcaggagcctctcaagattttttttgtcagaggctccaaatagaaaataagaaaaggttttcttcattcatggctagagctagatttaactcagtttctaggcacctcagaccaatcatcaactaccattctattccatgtttgcacctgtgcattttctgtttgcccccattcactttgtcaggaaaccttggcctctgctaaggtgtatttggtccttgagaagtgggagcaccctacagggacactatcactcatgctggtggcattgtttacagctagaaagctgcactggtgctaatgccccttgggaaatggggctgtgaggaggaggattataacttaggcctagcctcttttaacagcctctgaaatttatcttttcttctatggggcttataaatgtatcttataataaaaaggaaggacaggaggaagacaggcaaatgtacttctcacccagtcttctacacagatggaatctctttggggctaagagaaaggttttattctatattgcttacctgatctcatgttaggcctaagaggctttctccaggaggattagcttggagttctctatactcaggtacctctttcagggttttctaaccctgacacggactgtgcatactttccctcatccatgctgtgctgtgttatttaatttttcctggctaagatcatgtctgaattatgtatgaaaattattctatgtttttataataaaaataatatatcagacatcgaaaaaaaaaa

SEQ ID NO: 130 - DNA, 1022 bp, Homo sapiens
tcctggagcccaggctcttttccacagaggaggaaagagcaggcagcagagaccatggggcccccctcagcccctccccacagagaatgcatcccctggcaggggcttctgctcacagcctcacttctaaacttctggaacccgcccaccactgccaagctcactattgaatccatgccgctcagtgtcgcagaggggaaggaggtgcttctacttgtccacaatctgccccagcatctttttggctacagctggtacaaaggggaaagagtggatggcaacagtctaattgtgggatatgtaataggaactcaacaagctaccccaggggccgcatacagcggtcgagagacaatatacaccaatgcatccctgctgatccagaatgtcacccagaatgacataggattctacaccctacaagtcataaagtcagatcttgtgaatgaagaagcaactggacagttccatgtataccaagaaaatgccccaggccttcctgtgggggccgtcgccggcatcgtgaccggggtcctggtcggagtggcgctggtggccgcgctggtgtgtttcctgctccttgccaaaactggaaggccgtggtccctcccacagctctgccttctcgatgtcccctctctccactgcctaggcccccctacccaaccccaggacagcagcttccatctatgagaagtggcttcttagcttcctccaggagctgctcctgtgggttgatggagagtccccaaggcccccagccctggggatggggaaggacatgaagcctgagccagagaaccagctataagtcctgagaagacactggtgtctggggacagggagggatggggtccctgatgaatatctggagacctcgacagcctgccctaggccctgggtgggtcaggacaaaggcctctcatcaccgcagaaagcgggggcttgcagggaaagtgaatgggcctgtggcccacctggggtcacttggaaaggatctgaataaaggggacccttcctcg

SEQ ID NO: 131 - DNA, 1190 bp, Homo sapiens
gtcagcagccccgacagccgacagtcacagcagctctgacaagagcgttcctggagcccagctcctctccacagaccacaagcacccagcagagaccatgggccccccctcagccgctccccgtggagggcacaggccctggcaggggctcctgatcacagcctcacttttaaccttctgggacccgcccaccactgtccagttcactattgaagccctgccatccagtgctgcagagggaaaggatgttcttctactggcctgcaatatttcagaaactattcaagcctattattggcacaaggggaaaacggcagaagggagccctctcattgctggttatataacagacattcaagcaaatatcccaggggccgcatacagtggtcgagagcaagtataccccaatggatccctgctgttccaaaacatcaccctggaggacgcaggatcctacaccctacgaaccataaatgccagttacgactctgaccaagcaactggccagctccacgtacaccaaaacaacgtcccaggccttcctgtgggggccgtcgctggcatcgtgactggggtcctggttggggtggctctggtggccgccctggtgtgttttctgcttctctccaggactggaagggccagcatccagcgtgacctcagggagcagccgcccccagcctccacccctggccatggtccctctcacagatccaccttctcggcccctctacccagccccagaacagccactcccatctatgtggaatttctatactctgatgcaaacatttactgccagatcgaccacaaagcagatgtggtctcttaggttcctctgggagctgctcttgtgggttgatggagcgtcctcgaagctccagccctggggacggggaaggacatggagcctgagccagagaaccagctctgagtcctgaggagacacaggcctggggacagggagggatgggagtccctgctgaatatctggagaccctgacaggttgccctgggctccgggtgggccgggacaaaggcctctcatcaccacaggaagcgggggcttgcaaggaaagtgaatgggcctgtggcccacccggggtcaccaggaaaggatctgaataaagaggacccttcctctcattggctctttttctgctcacgggaacttagcagaaactcacctg

SEQ ID NO: 132 - DNA, 2249 bp, Homo sapiens
ctcctctacaaagaggtggacagagaagacagcagagaccatgggacccccctcagcccctccctgcagattgcatgtcccctggaaggaggtcctgctcacagcctcacttctaaccttctggaacccacccaccactgccaagctcactattgaatccacgccattcaatgtcgcagaggggaaggaggttcttctactcgcccacaacctgccccagaatcgtattggttacagctggtacaaaggcgaaagagtggatggcaacagtctaattgtaggatatgtaataggaactcaacaagctaccccagggcccgcatacagtggtcgagagacaatataccccaatgcatccctgctgatccagaacgtcacccagaatgacacaggattctataccctacaagtcataaagtcagatcttgtgaatgaagaagcaaccggacagttccatgtatacccggagctgcccaagccctccatctccagcaacaactccaaccccgtggaggacaaggatgctgtggccttcacctgtgaacctgaggttcagaacacaacctacctgtggtgggtaaatggtcagagcctcccggtcagtcccaggctgcagctgtccaatggcaacatgaccctcactctactcagcgtcaaaaggaacgatgcaggatcctatgaatgtgaaatacagaacccagcgagtgccaaccgcagtgacccagtcaccctgaatgtcctctatggcccagatgtccccaccatttccccctcaaaggccaattaccgtccaggggaaaatctgaacctctcctgccacgcagcctctaacccacctgcacagtactcttggtttatcaatgggacgttccagcaatccacacaagagctctttatccccaacatcactgtgaataatagcggatcctatatgtgccaagcccataactcagccactggcctcaataggaccacagtcacgatgatcacagtctctggaagtgctcctgtcctctcagctgtggccaccgtcggcatcacgattggagtgctggccagggtggctctgatatagcagccctggtgtattttcgatatttcaggaagactggcagattggaccagaccctgaattcttctagctcctccaatcccattttatcccatggaaccactaaaaacaaggtctgctctgctcctgaagccctatatgctggagatggacaactcaatgaaaatttaaagggaaaaccctcaggcctgaggtgtgtgccactcagagacttcacctaactagagacagtcaaactgcaaaccatggtgagaaattgacgacttcacactatggacagcttttcccaagatgtcaaaacaagactcctcatcatgataaggctcttacccccttttaatttgtccttgcttatgcctgcctctttcgcttggcaggatgatgctgtcattagtatttcacaagaagtagcttcagagggtaacttaacagagtgtcagatctatcttgtcaatcccaacgttttacataaaataagagatcctttagtgcacccagtgactgacattagcagcatctttaacacagccgtgtgttcaaatgtacagtggtccttttcagagttggacttctagactcacctgttctcactccctgttttaattcaacccagccatgcaatgccaaataatagaattgctccctaccagctgaacagggaggagtctgtgcagtttctgacacttgttgttgaacatggctaaatacaatgggtatcgctgagactaagttgtagaaattaacaaatgtgctgcttggttaaaatggctacactcatctgactcattctttattctattttagttggtttgtatcttgcctaaggtgcgtagtccaactcttggtattaccctcctaatagtcatactagtagtcatactccctggtgtagtgtattctctaaaagctttaaatgtctgcatgcagccagccatcaaatagtgaatggtctctctttggctggaattacaaaactcagagaaatgtgtcatcaggagaacatcataacccatgaaggataaaagccccaaatggtggtaactgataatagcactaatgctttaagatttggtcacactctcacctaggtgagcgcattgagccagtggtgctaaatgctacatactccaactgaaatgttaaggaagaagatagatccaaaaaaaaaaaaaaaaaa

SEQ ID NO: 133 - DNA, 2292 bp, Homo sapiens
ccatgggttccccttcagcctgtccatacagagtgtgcattccctggcaggggctcctgctcacagcctcgcttttaaccttctggaacctgccaaacagtgcccagaccaatattgatgtcgtgccgttcaatgtcgcagaagggaaggaggtccttctagtagtccataatgagtcccagaatctttatggctacaactggtacaaaggggaaagggtgcatgccaactatcgaattataggatatgtaaaaaatataagtcaagaaaatgccccagggcccgcacacaacggtcgagagacaatataccccaatggaaccctgctgatccagaacgttacccacaatgacgcaggattctataccctacacgttataaaagaaaatcttgtgaatgaagaagtaaccagacaattctacgtattctcggagccacccaagccctccatcaccagcaacaacttcaatccggtggagaacaaagatattgtggttttaacctgtcaacctgagactcagaacacaacctacctgtggtgggtaaacaatcagagcctcctggtcagtcccaggctgctgctctccactgacaacaggaccctcgttctactcagcgccacaaagaatgacataggaccctatgaatgtgaaatacagaacccagtgggtgccagccgcagtgacccagtcaccctgaatgtccgctatgagtcagtacaagcaagttcacctgacctctcagctgggaccgctgtcagcatcatgattggagtactggctgggatggctctgatatagcagccttggtgtagtttctgcatttcgggaagagtgtttttattatccacctgcagactggactggattcttctagctccttcaatcccattttctcctgtggcatcactaagtataagacctgctctcttcctgaagacctataagctggaggtggacaactcaatgtaaatttcaaggaaaaaccctcatgcctgagatgtgggccactcagagctaaccaaaatgttcaacaccataactagagacactcaaattgccaaccaggacaagaagttgatgacttcatgctgtggacagtttttcccaagatgtcccaagcctcatcgtgacgaggctcttatcccactccatttttccctgctcatgcctgcctctttaatttggtaagataatgctgtaactagaatttcacaatcagcgccttgtgcaggcaatttgacagagtgttggatgtgtcatgtcatcatgtcaaacccaaatatttgacctaagggatcctttattctgcccagtggctaactttaacaacatccctaatacaactgtttattcaaatgcacggtggtccctgttagagttagacctctagactcacctgttctcacgccctgttttaatttaacccagctatgggatgccagataacagaattgctgcctacgagctgaacagggaggagtttgtgcagttgctgacacttcttgttgcacataaataaatacagtgggtactatagagactcagttgcaaaaattaacaaatatgctgcttgattaaaatgggtaggcttctcatgtggctcattctttaatctattctcttttatttggtttggttcatggggtctctgcctatggatcatacttcaaactcttggtgtgatcctcctgattgtcacaatattagttaccctggtgtgctgtattctctaaaacctttaaatgtttgcatgcagccattcgtcaaatgtcaaatattctctctttggctggaatgacaaaaactcaaataaatgtatgattaggaggacatcataacctatgaatgatggaagtccaaaatgatggtaactgacagtagtgttaatgccttatgtttagtcaaactctcatttaggtgacagcctggtgactccagaatggagccagtcatgctaaatgccatatactcacactgaaacatgaggaagcaggtagatcccagaacagacaaaactttcctaaaaacatgagagtccaggctgtctgagtcagcacagtaagaaagtcctttctgctttaactcttagaaaaaagtaatatgaagtattctgaaattaaccaatcagtttatttaaatcaatttatttatattcttctgttcctggattcccattttacaaaacccactgttctactgttgtattgcccagtaggagctatcactatattttgcagaatggaaactgccctgactcttgaatcacaaataaaagccaattgtatctgtt

SEQ ID NO: 134 - DNA, 2297 bp, Homo sapiens
agccgtgctcagaaagtttctggatcccaggctcatctccacagaggagaacacgcaggcagcagagaccatggggcccatctcagccccttcctgcagatggcgcatcccctggcaggggctcctgctcacagcctcacttttcaccttctggaacccgcccaccactgctcagctcactattgaagctgtgccatccaatgctgcagaggggaaggaggttcttctacttgtccacaatctgccccaggaccctcgtggctacaactggtacaaaggggaaacagtggatgccaaccgtcgaattataggatatgtaatatcaaatcaacagattaccccagggcctgcatacagcaatcgagagacaatataccccaatgcatccctgctgatgcggaacgtcaccagaaatgacacaggatcctacaccctacaagtcataaagctaaatcttatgagtgaagaagtaactggccagttcagcgtacatccggagactcccaagccctccatctccagcaacaactccaaccccgtggaggacaaggatgctgtggccttcacctgtgaacctgagactcagaacacaacctacctgtggtgggtaaatggtcagagtctcccggtcagtcccaggctgcagctgtccaatggcaacaggaccctcactctactcagtgtcacaaggaatgacgtaggaccctatgaatgtgaaatacagaacccagcgagtgcaaacttcagtgacccagtcaccctgaatgtcctctatggcccagatgcccccaccatttccccttcagacacctattaccatgcaggggtaaatctcaacctctcctgccatgcggcctctaatccaccctcacagtattcttggtctgtcaatggcacattccagcaatacacacaaaagctctttatccccaacatcactacaaagaacagcggatcctatgcctgccacaccactaactcagccactggccgcaacaggaccacagtcaggatgatcacagtctctgatgctttagtacaaggaagttctcctggcctctcagctagagccactgtcagcatcatgattggagtactggccagggtggctctgatatagtagctctggtgtagtttctgcatttcaagaagactggcagacagttgtttttattcttcctcaaagcatttgcaatcagctaccattcaaaattgcttcttcttcaagatttatggaaaatactctgacgagtactcttgaacacaagttcctgataactttaagatcacgccactggactgtctatgaacttgcaaacaggctgatacctttgtgaagttgcccaccaaaacacagaaggaaaaaaacatgaatttcattgaactaaataataatgaggataatgtttttaagatttttttttttttttgagatggaatctcgctctgtcgcccaggctggagtgcagtggcacgatctcaactcactgcaagctccgcctcctgggttcacaccattctcctgcctcagcctcctgagtagctgggactacaggcgcctgccacaacgcccggctaattttttgtatttttagtagagacggggtttcactgtggtctcaatctcctgacttcatggtccgcctgcctcagcctcccaaagttctgggattacaggtgtgagccaccgcgcccagcccgtttttaagattttttatttgaaaaattgccaattctttaagtgttttctttttcagatttatgaatttctttatcttttaagctatctataccttactgcaatttggtaaagcagacttttgtgaacaaaaattataacatttacttttgctccctacctgactgccacagaactgggcaactattcatgagtattcatatgtttatggtaattcagttatttgcacaagttcagtgagaatctgctgtctttataatgggatatagtttaaaacattggttatattaccaaggctttgattgggatgttatatttgagaaaatacagagaatgatagattaacggagtgtctaatctatcgtgtcaaccccaaatttttacgtatgagatcctttagtccacccaatggctgacagtaacagcatctttaacacaactctttgttcaaatgtactatggtctcttttagagtcagactcctagactcacttgttctcactgtctgttttaatttaacccaggcatgcaatgctagataataaaattgctccctattggctgatcaaaaaaaaaaaaaaaaaaaaaaaaaaaaaaa

SEQ ID NO: 135 - DNA, 1552 bp, Homo sapiens
gcccgtacacaccgtgtgctgggacaccccacagtcagccgcatggctcccctgtgccccagcccctggctccctctgttgatcccggcccctgctccaggcctcactgtgcaactgctgctgtcactgctgcttctgatgcctgtccatccccagaggttgccccggatgcaggaggattcccccttgggaggaggctcttctggggaagatgacccactgggcgaggaggatctgcccagtgaagaggattcacccagagaggaggatccacccggagaggaggatctacctggagaggaggatctacctggagaggaggatctacctgaagttaagcctaaatcagaagaagagggctccctgaagttagaggatctacctactgttgaggctcctggagatcctcaagaaccccagaataatgcccacagggacaaagaaggggatgaccagagtcattggcgctatggaggcgacccgccctggccccgggtgtccccagcctgcgcgggccgcttccagtccccggtggatatccgcccccagctcgccgccttctgcccggccctgcgccccctggaactcctgggcttccagctcccgccgctcccagaactgcgcctgcgcaacaatggccacagtgtgcaactgaccctgcctcctgggctagagatggctctgggtcccgggcgggagtaccgggctctgcagctgcatctgcactggggggctgcaggtcgtccgggctcggagcacactgtggaaggccaccgtttccctgccgagatccacgtggttcacctcagcaccgcctttgccagagttgacgaggccttggggcgcccgggaggcctggccgtgttggccgcctttctggaggagggcccggaagaaaacagtgcctatgagcagttgctgtctcgcttggaagaaatcgctgaggaaggctcagagactcaggtcccaggactggacatatctgcactcctgccctctgacttcagccgctacttccaatatgaggggtctctgactacaccgccctgtgcccagggtgtcatctggactgtgtttaaccagacagtgatgctgagtgctaagcagctccacaccctctctgacaccctgtggggacctggtgactctcggctacagctgaacttccgagcgacgcagcctttgaatgggcgagtgattgaggcctccttccctgctggagtggacagcagtcctcgggctgctgagccagtccagctgaattcctgcctggctgctggtgacatcctagccctggtttttggcctcctttttgctgtcaccagcgtcgcgttccttgtgcagatgagaaggcagcacagaaggggaaccaaagggggtgtgagctaccgcccagcagaggtagccgagactggagcctagaggctggatcttggagaatgtgagaagccagccagaggcatctgagggggagccggtaactgtcctgtcctgctcattatgccacttccttttaactgccaagaaattttttaaaataaatatttataat

SEQ ID NO: 136 - protein, 702 aa, Homo sapiens
MESPSAPPHRWCIPWQRLLLTASLLTFWNPPTTAKLTIESTPFNVAEGKEVLLLVHNLPQHLFGYSWYKGERVDGNRQIIGYVIGTQQATPGPAYSGREIIYPNASLLIQNIIQNDTGFYTLHVIKSDLVNEEATGQFRVYPELPKPSISSNNSKPVEDKDAVAFTCEPETQDATYLWWVNNQSLPVSPRLQLSNGNRTLTLFNVTRNDTASYKCETQNPVSARRSDSVILNVLYGPDAPTISPLNTSYRSGENLNLSCHAASNPPAQYSWFVNGTFQQSTQELFIPNITVNNSGSYTCQAHNSDTGLNRTTVTTITVYAEPPKPFITSNNSNPVEDEDAVALTCEPEIQNTTYLWWVNNQSLPVSPRLQLSNDNRTLTLLSVTRNDVGPYECGIQNELSVDHSDPVILNVLYGPDDPTISPSYTYYRPGVNLSLSCHAASNPPAQYSWLIDGNIQQHTQELFISNITEKNSGLYTCQANNSASGHSRTTVKTITVSAELPKPSISSNNSKPVEDKDAVAFTCEPEAQNTTYLWWVNGQSLPVSPRLQLSNGNRTLTLFNVTRNDARAYVCGIQNSVSANRSDPVTLDVLYGPDTPIISPPDSSYLSGANLNLSCHSASNPSPQYSWRINGIPQQHTQVLFIAKITPNNNGTYACFVSNLATGRNNSIVKSITVSASGTSPGLSAGATVGIMIGVLVGVALI

SEQ ID NO: 137 - protein, 609 aa, Homo sapiens
MKWVESIFLIFLLNFTESRTLHRNEYGIASILDSYQCTAEISLADLATIFFAQFVQEATYKEVSKMVKDALTAIEKPTGDEQSSGCLENQLPAFLEELCHEKEILEKYGHSDCCSQSEEGRHNCFLAHKKPTPASIPLFQVPEPVTSCEAYEEDRETFMNKFIYEIARRHPFLYAPTILLWAARYDKIIPSCCKAENAVECFQTKAATVTKELRESSLLNQHACAVMKNFGTRTFQAITVTKLSQKFTKVNFTEIQKLVLDVAHVHEHCCRGDVLDCLQDGEKIMSYICSQQDTLSNKITECCKLTTLERGQCIIHAENDEKPEGLSPNLNRFLGDRDFNQFSSGEKNIFLASFVHEYSRRHPQLAVSVILRVAKGYQELLEKCFQTENPLECQDKGEEELQKYIQESQALAKRSCGLFQKLGEYYLQNAFLVAYTKKAPQLTSSELMAITRKMAATAATCCQLSEDKLLACGEGAADIIIGHLCIRHEMTPVNPGVGQCCTSSYANRRPCFSSLVVDETYVPPAFSDDKFIFHKDLCQAQGVALQTMKQEFLINLVKQKPQITEEQLEAVIADFSGLLEKCCQGQEQEVCFAEEGQKLISKTRAALGV

SEQ ID NO: 138 - protein, 99 aa, Homo sapiens
MTSKLAVALLAAFLISAALCEGAVLPRSAKELRCQCIKTYSKPFHPKFIKELRVIESGPHCANTEIIVKLSDGRELCLDPKENWVQRVVEKFLKRAENS

SEQ ID NO: 139 - protein, 300 aa, Homo sapiens
MRIAVICFCLLGITCAIPVKQADSGSSEEKQLYNKYPDAVATWLNPDPSQKQNLLAPQTLPSKSNESHDHMDDMDDEDDDDHVDSQDSIDSNDSDDVDDTDDSHQSDESHHSDESDELVTDFPTDLPATEVFTPVVPTVDTYDGRGDSVVYGLRSKSKKFRRPDIQYPDATDEDITSHMESEELNGAYKAIPVAQDLNAPSDWDSRGKDSYETSQLDDQSAETHSHKQSRLYKRKANDESNEHSDVIDSQELSKVSREFHSHEFHSHEDMLVVDPKSKEEDKHLKFRISHELDSASSEVN

SEQ ID NO: 140 - protein, 871 aa, Homo sapiens
MKYSCCALVLAVLGTELLGSLCSTVRSPRFRGRIQQERKNIRPNIILVLTDDQDVELGSLQVMNKTRKIMEHGGATFINAFVTTPMCCPSRSSMLTGKYVHNHNVYTNNENCSSPSWQAMHEPRTFAVYLNNTGYRTAFFGKYLNEYNGSYIPPGWREWLGLIKNSRFYNYTVCRNGIKEKHGFDYAKDYFTDLITNESINYFKMSKRMYPHRPVMMVISHAAPHGPEDSAPQFSKLYPNASQHITPSYNYAPNMDKHWIMQYTGPMLPIHMEFTNILQRKRLQTLMSVDDSVERLYNMLVETGELENTYIIYTADHGYHIGQFGLVKGKSMPYDFDIRVPFFIRGPSVEPGSIVPQIVLNIDLAPTILDIAGLDTPPDVDGKSVLKLLDPEKPGNRFRTNKKAKIWRDTFLVERGKFLRKKEESSKNIQQSNHLPKYERVKELCQQARYQTACEQPGQKWQCIEDTSGKLRIHKCKGPSDLLTVRQSTRNLYARGFHDKDKECSCRESGYRASRSQRKSQRQFLRNQGTPKYKPRFVHTRQTRSLSVEFEGEIYDINLEEEEELQVLQPRNIAKRHDEGHKGPRDLQASSGGNRGRMLADSSNAVGPPTTVRVTHKCFILPNDSIHCERELYQSARAWKDHKAYIDKEIEALQDKIKNLREVRGHLKRRKPEECSCSKQSYYNKEKGVKKQEKLKSHLHPFKEAAQEVDSKLQLFKENNRRRKKERKEKRRQRKGEECSLPGLTCFTHDNNHWQTAPFWNLGSFCACTSSNNNTYWCLRTVNETHNFLFCEFATGFLEYFDMNTDPYQLTNTVHTVERGILNQLHVQLMELRSCQGYKQCNPRPKNLDVGNKDGGSYDLHRGQLWDGWEG

SEQ ID NO: 141 - protein, 470 aa, Homo sapiens
MKFLLILLLQATASGALPLNSSTSLEKNNVLFGERYLEKFYGLEINKLPVTKMKYSGNLMKEKIQEMQHFLGLKVTGQLDTSTLEMMHAPRCGVPDLHHFREMPGGPVWRKHYITYRINNYTPDMNREDVDYAIRKAFQVWSNVTPLKFSKINTGMADILVVFARGAHGDFHAFDGKGGILAHAFGPGSGIGGDAHFDEDEFWTTHSGGTNLFLTAVHEIGHSLGLGHSSDPKAVMFPTYKYVDINTFRLSADDIRGIQSLYGDPKENQRLPNPDNSEPALCDPNLSFDAVTTVGNKIFFFKDRFFWLKVSERPKTSVNLISSLWPTLPSGIEAAYEIEARNQVFLFKDDKYWLISNLRPEPNYPKSIHSFGFPNFVKKIDAAVFNPRFYRTYFFVDNQYWRYDERRQMMDPGYPKLITKNFQGIGPKIDAVFYSKNKYYYFFQGSNQFEYDFLLQRITKTLKSNSWFGC

SEQ ID NO: 142 - protein, 165 aa, Homo sapiens
MAPNASCLCVHVRSEEWDLMTFDANPYDSVKKIKEHVRSKTKVPVQDQVLLLGSKILKPRRSLSSYGIDKEKTIHLTLKVVKPSDEELPLFLVESGDEAKRHLLQVRRSSSVAQVKAMIETKTGIIPETQIVTCNGKRLEDGKMMADYGIRKGNLLFLASYCIGG

SEQ ID NO: 143 - protein, 1464 aa, Homo sapiens
MFSFVDLRLLLLLAATALLTHGQEEGQVEGQDEDIPPITCVQNGLRYHDRDVWKPEPCRICVCDNGKVLCDDVICDETKNCPGAEVPEGECCPVCPDGSESPTDQETTGVEGPKGDTGPRGPRGPAGPPGRDGIPGQPGLPGPPGPPGPPGPPGLGGNFAPQLSYGYDEKSTGGISVPGPMGPSGPRGLPGPPGAPGPQGFQGPPGEPGEPGASGPMGPRGPPGPPGKNGDDGEAGKPGRPGERGPPGPQGARGLPGTAGLPGMKGHRGFSGLDGAKGDAGPAGPKGEPGSPGENGAPGQMGPRGLPGERGRPGAPGPAGARGNDGATGAAGPPGPTGPAGPPGFPGAVGAKGEAGPQGPRGSEGPQGVRGEPGPPGPAGAAGPAGNPGADGQPGAKGANGAPGIAGAPGFPGARGPSGPQGPGGPPGPKGNSGEPGAPGSKGDTGAKGEPGPVGVQGPPGPAGEEGKRGARGEPGPTGLPGPPGERGGPGSRGFPGADGVAGPKGPAGERGSPGPAGPKGSPGEAGRPGEAGLPGAKGLTGSPGSPGPDGKTGPPGPAGQDGRPGPPGPPGARGQAGVMGFPGPKGAAGEPGKAGERGVPGPPGAVGPAGKDGEAGAQGPPGPAGPAGERGEQGPAGSPGFQGLPGPAGPPGEAGKPGEQGVPGDLGAPGPSGARGERGFPGERGVQGPPGPAGPRGANGAPGNDGAKGDAGAPGAPGSQGAPGLQGMPGERGAAGLPGPKGDRGDAGPKGADGSPGKDGVRGLTGPIGPPGPAGAPGDKGESGPSGPAGPTGARGAPGDRGEPGPPGPAGFAGPPGADGQPGAKGEPGDAGAKGDAGPPGPAGPAGPPGPIGNVGAPGAKGARGSAGPPGATGFPGAAGRVGPPGPSGNAGPPGPPGPAGKEGGKGPRGETGPAGRPGEVGPPGPPGPAGEKGSPGADGPAGAPGTPGPQGIAGQRGVVGLPGQRGERGFPGLPGPSGEPGKQGPSGASGERGPPGPMGPPGLAGPPGESGREGAPAAEGSPGRDGSPGAKGDRGETGPAGPPGAPGAPGAPGPVGPAGKSGDRGETGPAGPAGPVGPVGARGPAGPQGPRGDKGETGEQGDRGIKGHRGFSGLQGPPGPPGSPGEQGPSGASGPAGPRGPPGSAGAPGKDGLNGLPGPIGPPGPRGRTGDAGPVGPPGPPGPPGPPGPPSAGFDFSFLPQPPQEKAHDGGRYYRADDANVVRDRDLEVDTTLKSLSQQIENIRSPEGSRKNPARTCRDLKMCHSDWKSGEYWIDPNQGCNLDAIKVFCNMETGETCVYPTQPSVAQKNWYISKNPKDKRHVWFGESMTDGFQFEYGGQGSDPADVAIQLTFLRLMSTEASQNITYHCKNSVAYMDQQTGNLKKALLLKGSNEIEIRAEGNSRFTYSVTVDGCTSHTGAWGKTVIEYKTTKSSRLPIIDVAPLDVGAPDQEFGFDVGPVCFL

SEQ ID NO: 144 - protein, 338 aa, Homo sapiens
MSLSAFTLFLALIGGTSGQYYDYDFPLSIYGQSSPNCAPECNCPESYPSAMYCDELKLKSVPMVPPGIKYLYLRNNQIDHIDEKAFENVTDLQWLILDHNLLENSKIKGRVFSKLKQLKKLHINHNNLTESVGPLPKSLEDLQLTHNKITKLGSFEGLVNLTFIHLQHNRLKEDAVSAAFKGLKSLEYLDLSFNQIARLPSGLPVSLLTLYLDNNKISNIPDEYFKRFNALQYLRLSHNELADSGIPGNSFNVSSLVELDLSYNKLKNIPTVNENLENYYLEVNQLEKFDIKSFCKILGPLSYSKIKHLRLDGNRISETSLPPDMYECLRVANEVTLN

SEQ ID NO: 145 - protein, 589 aa, Homo sapiens
MSVSVHENRKSRASSGSINIYLFHKSSYADSVLTHLNLLRQQRLFTDVLLHAGNRTFPCHRAVLAACSRYFEAMFSGGLKESQDSEVNFDNSIHPEVLELLLDYAYSSRVIINEENAESLLEAGDMLEFQDIRDACAEFLEKNLHPTNCLGMLLLSDAHQCTKLYELSWRMCLSNFQTIRKNEDFLQLPQDMVVQLLSSEELETEDERLVYESAINWISYDLKKRYCYLPELLQTVRLALLPAIYLMENVAMEELITKQRKSKEIVEEAIRCKLKILQNDGVVTSLCARPRKTGHALFLLGGQTFMCDKLYLVDQKAKEIIPKADIPSPRKEFSACAIGCKVYITGGRGSENGVSKDVWVYDTLHEEWSKAAPMLVARFGHGSAELKHCLYVVGGHTAATGCLPASPSVSLKQVEHYDPTINKWTMVAPLREGVSNAAVVSAKLKLFAFGGTSVSHDKLPKVQCYDQCENRWTVPATCPQPWRYTAAAVLGNQIFIMGGDTEFSACSAYKFNSETYQWTKVGDVTAKRMSCHAVASGNKLYVVGGYFGIQRCKTLDCYDPTLDVWNSITTVPYSLIPTAFVSTWKHLPS

SEQ ID NO: 146 - protein, 193 aa, Homo sapiens
MIRCGLACERCRWILPLLLLSAIAFDIIALAGRGWLQSSDHGQTSSLWWKCSQEGGGSGSYEEGCQSLMEYAWGRAAAAMLFCGFIILVICFILSFFALCGPQMLVFLRVIGGLLALAAVFQIISLVIYPVKYTQTFTLHANPAVTYIYNWAYGFGWAATIILIGCAFFFCCLLNYEDDLLGNAKPRYFYTSA

SEQ ID NO: 147 - protein, 423 aa, Homo sapiens
MRSSGADAGRCLVTARAPGSVPASREGSAGSRGPGARFPARVSARGSAPGPGLGGAGALDPPAVVAESVSSLTIADAFIAAGESSAPTPPRPALPRRFICSFPDCSANYSKAWKLDAHLCKHTGERPFVCDYEGCGKAFIRDYHLSRHILTHTGEKPFVCAANGCDQKFNTKSNLKKHFERKHENQQKQYICSFEDCKKTFKKHQQLKIHQCQNTNEPLFKCTQEGCGKHFASPSKLKRHAKAHEGYVCQKGCSFVAKTWTELLKHVRETHKEEILCEVCRKTFKRKDYLKQHMKTHAPERDVCRCPREGCGRTYTTVFNLQSHILSFHEESRPFVCEHAGCGKTFAMKQSLTRHAVVHDPDKKKMKLKVKKSREKREFGLSSQWIYPPKRKQGQGLSLCQNGESPNCVEDKMLSTVAVLTLG

SEQ ID NO: 148 - protein, 339 aa, Homo sapiens
MWQLWASLCCLLVLANARSRPSFHPLSDELVNYVNKRNTTWQAGHNFYNVDMSYLKRLCGTFLGGPKPPQRVMFTEDLKLPASFDAREQWPQCPTIKEIRDQGSCGSCWAFGAVEAISDRICIHTNAHVSVEVSAEDLLTCCGSMCGDGCNGGYPAEAWNFWTRKGLVSGGLYESHVGCRPYSIPPCEHHVNGSRPPCTGEGDTPKCSKICEPGYSPTYKQDKHYGYNSYSVSNSEKDIMAEIYKNGPVEGAFSVYSDFLLYKSGVYQHVTGEMMGGHAIRILGWGVENGTPYWLVANSWNTDWGDNGFFKILRGQDHCGIESEVVAGIPRTDQYWEKI

SEQ ID NO: 149 - protein, 150 aa, Homo sapiens
MAARGVIAPVGESLRYAEYLQPSAKRPDADVDQQGLVRSLIAVGLGVAALAFAGRYAFRIWKPLEQVITETAKKISTPSFSSYYKGGFEQKMSRREAGLILGVSPSAGKAKIRTAHRRVMILNHPDKGGSPYVAAKINEAKDLLETTTKH

SEQ ID NO: 150 - protein, 1212 aa, Homo sapiens
MEPRPTAPSSGAPGLAGVGETPSAAALAAARVELPGTAVPSVPEDAAPASRDGGGVRDEGPAAAGDGLGRPLGPTPSQSRFQVDLVSENAGRAAAAAAAAAAAAAAAGAGAGAKQTPADGEASGESEPAKGSEEAKGRFRVNFVDPAASSSAEDSLSDAAGVGVDGPNVSFQNGGDTVLSEGSSLHSGGGGGSGHHQHYYYDTHTNTYYLRTFGHNTMDAVPRIDHYRHTAAQLGEKLLRPSLAELHDELEKEPFEDGFANGEESTPTRDAVVTYTAESKGVVKFGWIKGVLVRCMLNIWGVMLFIRLSWIVGQAGIGLSVLVIMMATVVTTITGLSTSAIATNGFVRGGGAYYLISRSLGPEFGGAIGLIFAFANAVAVAMYVVGFAETVVELLKEHSILMIDEINDIRIIGAITVVILLGISVAGMEWEAKAQIVLLVILLLAIGDFVIGTFIPLESKKPKGFFGYKSEIFNENFGPDFREEETFFSVFAIFFPAATGILAGANISGDLADPQSAIPKGTLLAILITTLVYVGIAVSVGSCVVRDATGNVNDTIVTELTNCTSAACKLNFDFSSCESSPCSYGLMNNFQVMSMVSGFTPLISAGIFSATLSSALASLVSAPKIFQALCKDNIYPAFQMFAKGYGKNNEPLRGYILTFLIALGFILIAELNVIAPIISNFFLASYALINFSVFHASLAKSPGWRPAFKYYNMWISLLGAILCCIVMFVINWWAALLTYVIVLGLYIYVTYKKPDVNWGSSTQALTYLNALQHSIRLSGVEDHVKNFRPQCLVMTGAPNSRPALLHLVHDFTKNVGLMICGHVHMGPRRQAMKEMSIDQAKYQRWLIKNKMKAFYAPVHADDLREGAQYLMQAAGLGRMKPNTLVLGFKKDWLQADMRDVDMYINLFHDAFDIQYGVVVIRLKEGLDISHLQGQEELLSSQEKSPGTKDVVVSVEYSKKSDLDTSKPLSEKPITHKVEEEDGKTATQPLLKKESKGPIVPLNVADQKLLEASTQFQKKQGKNTIDVWWLFDDGGLTLLIPYLLTTKKKWKDCKIRVFIGGKINRIDHDRRAMATLLSKFRIDFSDIMVLGDINTKPKKENIIAFEEIIEPYRLHEDDKEQDIADKMKEDEPWRITDNELELYKTKTYRQIRLNELLKEHSSTANIIVMSLPVARKGAVSSALYMAWLEALSKDLPPILLVRGNHQSVLTFYS

SEQ ID NO: 151 - protein, 230 aa, Homo sapiens
MNEMYLRCDHENQYAQWMAACMLASKGKTMADSSYQPEVLNILSFLRMKNRNSASQVASSLENMDMNPECFVSPRCAKRHKSKQLAARILEAHQNVAQMPLVEAKLRFIQAWQSLPEFGLTYYLVRFKGSKKDDILGVSYNRLIKIDAATGIPVTTWRFTNIKQWNVNWETRQVVIEFDQNVFTAFTCLSADCKIVHEYIGGYIFLSTRSKDQNETLDEDLFHKLTGGQD

SEQ ID NO: 152 - protein, 383 aa, Homo sapiens
MEALGKLKQFDAYPKTLEDFRVKTCGGATVTIVSGLLMLLLFLSELQYYLTTEVHPELYVDKSRGDKLKINIDVLFPHMPCAYLSIDAMDVAGEQQLDVEHNLFKQRLDKDGIPVSSEAERHELGKVEVTVFDPDSLDPDRCESCYGAEAEDIKCCNTCEDVREAYRRRGWAFKNPDTIEQCRREGFSQKMQEQKNEGCQVYGFLEVNKVAGNFHFAPGKSFQQSHVHVHDLQSFGLDNINMTHYIQHLSFGEDYPGIVNPLDHTNVTAPQASMMFQYFVKVVPTVYMKVDGEVLRTNQFSVTRHEKVANGLLGDQGLPGVFVLYELSPMMVKLTEKHRSFTHFLTGVCAIIGGMFTVAGLIDSLIYHSARAIQKKIDLGKTT

SEQ ID NO: 153 - protein, 391 aa, Homo sapiens
MADIDNKEQSELDQDLDDVEEVEEEETGEETKLKARQLTVQMMQNPQILAALQERLDGLVETPTGYIESLPRVVKRRVNALKNLQVKCAQIEAKFYEEVHDLERKYAVLYQPLFDKRFEIINAIYEPTEEECEWKPDEEDEISEELKEKAKIEDEKKDEEKEDPKGIPEFWLTVFKNVDLLSDMVQEHDEPILKHLKDIKVKFSDAGQPMSFVLEFHFEPNEYFTNEVLTKTYRMRSEPDDSDPFSFDGPEIMGCTGCQIDWKKGKNVTLKTIKKKQKHKGRGTVRTVTKTVSNDSFFNFFAPPEVPESGDLDDDAEAILAADFEIGHFLRERIIPRSVLYFTGEAIEDDDDDYDEEGEEADEEGEEEGDEENDPDYDPKKDQNPAECKQQ

SEQ ID NO: 154 - protein, 836 aa, Homo sapiens
MIPFLPMFSLLLLLIVNPINANNHYDKILAHSRIRGRDQGPNVCALQQILGTKKKYFSTCKNWYKKSICGQKTTVLYECCPGYMRMEGMKGCPAVLPIDHVYGTLGIVGATTTQRYSDASKLREEIEGKGSFTYFAPSNEAWDNLDSDIRRGLESNVNVELLNALHSHMINKRMLTKDLKNGMIIPSMYNNLGLFINHYPNGVVTVNCARIIHGNQIATNGVVHVIDRVLTQIGTSIQDFIEAEDDLSSFRAAAITSDILEALGRDGHFTLFAPTNEAFEKLPRGVLERFMGDKVASEALMKYHILNTLQCSESIMGGAVFETLEGNTIEIGCDGDSITVNGIKMVNKKDIVTNNGVIHLIDQVLIPDSAKQVIELAGKQQTTFTDLVAQLGLASALRPDGEYTLLAPVNNAFSDDTLSMVQRLLKLILQNHILKVKVGLNELYNGQILETIGGKQLRVFVYRTAVCIENSCMEKGSKQGRNGAIHIFREIIKPAEKSLHEKLKQDKRFSTFLSLLEAADLKELLTQPGDWTLFVPTNDAFKGMTSEEKEILIRDKNALQNIILYHLTPGVFIGKGFEPGVTNILKTTQGSKIFLKEVNDTLLVNELKSKESDIMTTNGVIHVVDKLLYPADTPVGNDQLLEILNKLIKYIQIKFVRGSTFKEIPVTVYTTKIITKVVEPKIKVIEGSLQPIIKTEGPTLTKVKIEGEPEFRLIKEGETITEVIHGEPIIKKYTKIIDGVPVEITEKETREERIITGPEIKYTRISTGGGETEETLKKLLQEEVTKVTKFIEGGDGHLFEDEEIKRLLQGDTPVRKLQANKKVQGSRRRLREGRSQ

SEQ ID NO: 155 - protein, 3176 aa, Homo sapiens
MRKHRHLPLVAVFCLFLSGFPTTHAQQQQADVKNGAAADIIFLVDSSWTIGEEHFQLVREFLYDVVKSLAVGENDFHFALVQFNGNPHTEFLLNTYRTKQEVLSHISNMSYIGGTNQTGKGLEYIMQSHLTKAAGSRAGDGVPQVIVVLTDGHSKDGLALPSAELKSADVNVFAIGVEDADEGALKEIASEPLNMHMFNLENFTSLHDIVGNLVSCVHSSVSPERAGDTETLKDITAQDSADIIFLIDGSNNTGSVNFAVILDFLVNLLEKLPIGTQQIRVGVVQFSDEPRTMFSLDTYSTKAQVLGAVKALGFAGGELANIGLALDFVVENHFTRAGGSRVEEGVPQVLVLISAGPSSDEIRYGVVALKQASVFSFGLGAQAASRAELQHIATDDNLVFTVPEFRSFGDLQEKLLPYIVGVAQRHIVLKPPTIVTQVIEVNKRDIVFLVDGSSALGLANFNAIRDFIAKVIQRLEIGQDLIQVAVAQYADTVRPEFYFNTHPTKREVITAVRKMKPLDGSALYTGSALDFVRNNLFTSSAGYRAAEGIPKLLVLITGGKSLDEISQPAQELKRSSIMAFAIGNKGADQAELEEIAFDSSLVFIPAEFRAAPLQGMLPGLLAPLRTLSGTPEVHSNKRDIIFLLDGSANVGKTNFPYVRDFVMNLVNSLDIGNDNIRVGLVQFSDTPVTEFSLNTYQTKSDILGHLRQLQLQGGSGLNTGSALSYVYANHFTEAGGSRIREHVPQLLLLLTAGQSEDSYLQAANALTRAGILTFCVGASQANKAELEQIAFNPSLVYLMDDFSSLPALPQQLIQPLTTYVSGGVEEVPLAQPESKRDILFLFDGSANLVGQFPVVRDFLYKIIDELNVKPEGTRIAVAQYSDDVKVESRFDEHQSKPEILNLVKRMKIKTGKALNLGYALDYAQRYIFVKSAGSRIEDGVLQFLVLLVAGRSSDRVDGPASNLKQSGVVPFIFQAKNADPAELEQIVLSPAFILAAESLPKIGDLHPQIVNLLKSVHNGAPAPVSGEKDVVFLLDGSEGVRSGFPLLKEFVQRVVESLDVGQDRVRVAVVQYSDRTRPEFYLNSYMNKQDVVNAVRQLTLLGGPTPNTGAALEFVLRNILVSSAGSRITEGVPQLLIVLTADRSGDDVRNPSVVVKRGGAVPIGIGIGNADITEMQTISFIPDFAVAIPTFRQLGTVQQVISERVTQLTREELSRLQPVLQPLPSPGVGGKRDVVFLIDGSQSAGPEFQYVRTLIERLVDYLDVGFDTTRVAVIQFSDDPKAEFLLNAHSSKDEVQNAVQRLRPKGGRQINVGNALEYVSRNIFKRPLGSRIEEGVPQFLVLISSGKSDDEVVVPAVELKQFGVAPFTIARNADQEELVKISLSPEYVFSVSTFRELPSLEQKLLTPITTLTSEQIQKLLASTRYPPPAVESDAADIVFLIDSSEGVRPDGFAHIRDFVSRIVRRLNIGPSKVRVGVVQFSNDVFPEFYLKTYRSQAPVLDAIRRLRLRGGSPLNTGKALEFVARNLFVKSAGSRIEDGVPQHLVLVLGGKSQDDVSRFAQVIRSSGIVSLGVGDRNIDRTELQTITNDPRLVFTVREFRELPNIEERIMNSFGPSAATPAPPGVDTPPPSRPEKKKADIVFLLDGSINFRRDSFQEVLRFVSEIVDTVYEDGDSIQVGLVQYNSDPTDEFFLKDFSTKRQIIDAINKVVYKGGRHANTKVGLEHLRVNHFVPEAGSRLDQRVPQIAFVITGGKSVEDAQDVSLALTQRGVKVFAVGVRNIDSEEVGKIASNSATAFRVGNVQELSELSEQVLETLHDAMHETLCPGVTDAAKACNLDVILGFDGSRDQNVFVAQKGFESKVDAILNRISQMHRVSCSGGRSPTVRVSVVANTPSGPVEAFDFDEYQPEMLEKFRNMRSQHPYVLTEDTLKVYLNKFRQSSPDSVKVVIHFTDGADGDLADLHRASENLRQEGVRALILVGLERVVNLERLMHLEFGRGFMYDRPLRLNLLDLDYELAEQLDNIAEKACCGVPCKCSGQRGDRGPIGSIGPKGIPGEDGYRGYPGDEGGPGERGPPGVNGTQGFQGCPGQRGVKGSRGFPGEKGEVGEIGLDGLDGEDGDKGLPGSSGEKGNPGRRGDKGPRGEKGERGDVGIRGDPGNPGQDSQERGPKGETGDLGPMGVPGRDGVPGGPGETGKNGGFGRRGPPGAKGNKGGPGQPGFEGEQGTRGAQGPAGPAGPPGLIGEQGISGPRGSGGARGAPGERGRTGPLGRKGEPGEPGPKGGIGNPGPRGETGDDGRDGVGSEGRRGKKGERGFPGYPGPKGNPGEPGLNGTTGPKGIRGRRGNSGPPGIVGQKGRPGYPGPAGPRGNRGDSIDQCALIQSIKDKCPCCYGPLECPVFPTELAFALDTSEGVNQDTFGRMRDVVLSIVNVLTIAESNCPTGARVAVVTYNNEVTTEIRFADSKRKSVLLDKIKNLQVALTSKQQSLETAMSFVARNTFKRVRNGFLMRKVAVFFSNTPTRASPQLREAVLKLSDAGITPLFLTRQEDRQLINALQINNTAVGHALVLPAGRDLTDFLENVLTCHVCLDICNIDPSCGFGSWRPSFRDRRAAGSDVDIDMAFILDSAETTTLFQFNEMKKYIAYLVRQLDMSPDPKASQHFARVAVVQHAPSESVDNASMPPVKVEFSLTDYGSKEKLVDFLSRGMTQLQGTRALGSAIEYTIENVFESAPNPRDLKIVVLMLTGEVPEQQLEEAQRVILQAKCKGYFFVVLGIGRKVNIKEVYTFASEPNDVFFKLVDKSTELNEEPLMRFGRLLPSFVSSENAFYLSPDIRKQCDWFQGDQPTKNLVKFGHKQVNVPNNVTSSPTSNPVTTTKPVTTTKPVTTTTKPVTTTTKPVTIINQPSVKPAAAKPAPAKPVAAKPVATKTATVRPPVAVKPATAAKPVAAKPAAVRPPAAAAKPVATKPEVPRPQAAKPAATKPATTKPVVKMLREVQVFEITENSAKLHWERPEPPGPYFYDLTVTSAHDQSLVLKQNLTVTDRVIGGLLAGQTYHVAVVCYLRSQVRATYHGSFSTKKSQPPPPQPARSASSSTINLMVSTEPLALTETDICKLPKDEGTCRDFILKWYYDPNTKSCARFWYGGCGGNENKFGSQKECEKVCAPVLAKPGVISVMGT

SEQ ID NO: 156 - protein, 303 aa, Homo sapiens
MRAWIFFLLCLAGRALAAPQQEALPDETEVVEETVAEVTEVSVGANPVQVEVGEFDDGAEETEEEVVAENPCQNHHCKHGKVCELDENNTPMCVCQDPTSCPAPIGEFEKVCSNDNKTFDSSCHFFATKCTLEGTKKGHKLHLDYIGPCKYIPPCLDSELTEFPLRMRDWLKNVLVTLYERDEDNNLLTEKQKLRVKKIHENEKRLEAGDHPVELLARDFEKNYNMYIFPVHWQFGQLDQHPIDGYLSHTELAPLRAPLIPMEHCTTRFFETCDLDNDKYIALDEWAGCFGIKQKDIDKDLVI

SEQ ID NO: 157 - protein, 683 aa, Homo sapiens; identical to SEQ ID NO: 42

SEQ ID NO: 158 - protein, 2355 aa, Homo sapiens
MLRGPGPGLLLLAVQCLGTAVPSTGASKSKRQAQQMVQPQSPVAVSQSKPGCYDNGKHYQINQQWERTYLGNALVCTCYGGSRGFNCESKPEAEETCFDKYTGNTYRVGDTYERPKDSMIWDCTCIGAGRGRISCTIANRCHEGGQSYKIGDTWRRPHETGGYMLECVCLGNGKGEWTCKPIAEKCFDHAAGTSYVVGETWEKPYQGWMMVDCTCLGEGSGRITCTSRNRCNDQDTRTSYRIGDTWSKKDNRGNLLQCICTGNGRGEWKCERHTSVQTTSSGSGPFTDVRAAVYQPQPHPQPPPYGHCVTDSGVVYSVGMQWLKTQGNKQMLCTCLGNGVSCQETAVTQTYGGNSNGEPCVLPFTYNGRTFYSCTTEGRQDGHLWCSTTSNYEQDQKYSFCTDHTVLVQTRGGNSNGALCHFPFLYNNHNYTDCTSEGRRDNMKWCGTTQNYDADQKFGFCPMAAHEEICTTNEGVMYRIGDQWDKQHDMGHMMRCTCVGNGRGEWTCIAYSQLRDQCIVDDITYNVNDTFHKRHEEGHMLNCTCFGQGRGRWKCDPVDQCQDSETGTFYQIGDSWEKYVHGVRYQCYCYGRGIGEWHCQPLQTYPSSSGPVEVFITETPSQPNSHPIQWNAPQPSHISKYILRWRPKNSVGRWKEATIPGHLNSYTIKGLKPGVVYEGQLISIQQYGHQEVTRFDFTTTSTSTPVTSNTVTGETTPFSPLVATSESVTEITASSFVVSWVSASDTVSGFRVEYELSEEGDEPQYLDLPSTATSVNIPDLLPGRKYIVNVYQISEDGEQSLILSTSQTTAPDAPPDPTVDQVDDTSIVVRWSRPQAPITGYRIVYSPSVEGSSTELNLPETANSVTLSDLQPGVQYNITIYAVEENQESTPVVIQQETTGTPRSDTVPSPRDLQFVEVTDVKVTIMWTPPESAVTGYRVDVIPVNLPGEHGQRLPISRNTFAEVTGLSPGVTYYFKVFAVSHGRESKPLTAQQTTKLDAPTNLQFVNETDSTVLVRWTPPRAQITGYRLTVGLTRRGQPRQYNVGPSVSKYPLRNLQPASEYTVSLVAIKGNQESPKATGVFTTLQPGSSIPPYNTEVTETTIVITWTPAPRIGFKLGVRPSQGGEAPREVTSDSGSIVVSGLTPGVEYVYTIQVLRDGQERDAPIVNKVVTPLSPPTNLHLEANPDTGVLTVSWERSTTPDITGYRITTTPTNGQQGNSLEEVVHADQSSCTFDNLSPGLEYNVSVYTVKDDKESVPISDTIIPAVPPPTDLRFTNIGPDTMRVTWAPPPSIDLTNFLVRYSPVKNEEDVAELSISPSDNAVVLTNLLPGTEYVVSVSSVYEQHESTPLRGRQKTGLDSPTGIDFSDITANSFTVHWIAPRATITGYRIRHHPEHFSGRPREDRVPHSRNSITLTNLTPGTEYVVSIVALNGREESPLLIGQQSTVSDVPRDLEVVAATPTSLLISWDAPAVTVRYYRITYGETGGNSPVQEFTVPGSKSTATISGLKPGVDYTITVYAVTGRGDSPASSKPISINYRTEIDKPSQMQVTDVQDNSISVKWLPSSSPVTGYRVTTTPKNGPGPTKTKTAGPDQTEMTIEGLQPTVEYVVSVYAQNPSGESQPLVQTAVTNIDRPKGLAFTDVDVDSIKIAWESPQGQVSRYRVTYSSPEDGIHELFPAPDGEEDTAELQGLRPGSEYTVSVVALHDDMESQPLIGTQSTAIPAPTDLKFTQVTPTSLSAQWTPPNVQLTGYRVRVTPKEKTGPMKEINLAPDSSSVVVSGLMVATKYEVSVYALKDTLTSRPAQGVVTTLENVSPPRRARVTDATETTITISWRTKTETITGFQVDAVPANGQTPIQRTIKPDVRSYTITGLQPGTDYKIYLYTLNDNARSSPVVIDASTAIDAPSNLRFLATTPNSLLVSWQPPRARITGYIIKYEKPGSPPREVVPRPRPGVTEATITGLEPGTEYTIYVIALKNNQKSEPLIGRKKTDELPQLVTLPHPNLHGPEILDVPSTVQKTPFVTHPGYDTGNGIQLPGTSGQQPSVGQQMIFEEHGFRRTTPPTTATPIRHRPRPYPPNVGQEALSQTTISWAPFQDTSEYIISCHPVGTDEEPLQFRVPGTSTSATLTGLTRGATYNIIVEALKDQQRHKVREEVVTVGNSVNEGLNQPTDDSCFDPYTVSHYAVGDEWERMSESGFKLLCQCLGFGSGHFRCDSSRWCHDNGVNYKIGEKWDRQGENGQMMSCTCLGNGKGEFKCDPHEATCYDDGKTYHVGEQWQKEYLGAICSCTCFGGQRGWRCDNCRRPGGEPSPEGTTGQSYNQYSQRYHQRTNTNVNCPIECFMPLDVQADREDSRE

SEQ ID NO: 159 - protein, 1366 aa, Homo sapiens
MLSFVDTRTLLLLAVTLCLATCQSLQEETVRKGPAGDRGPRGERGPPGPPGRDGEDGPTGPPGPPGPPGPPGLGGNFAAQYDGKGVGLGPGPMGLMGPRGPPGAAGAPGPQGFQGPAGEPGEPGQTGPAGARGPAGPPGKAGEDGHPGKPGRPGERGVVGPQGARGFPGTPGLPGFKGIRGHNGLDGLKGQPGAPGVKGEPGAPGENGTPGQTGARGLPGERGRVGAPGPAGARGSDGSVGPVGPAGPIGSAGPPGFPGAPGPKGEIGAVGNAGPAGPAGPRGEVGLPGLSGPVGPPGNPGANGLTGAKGAAGLPGVAGAPGLPGPRGIPGPVGAAGATGARGLVGEPGPAGSKGESGNKGEPGSAGPQGPPGPSGEEGKRGPNGEAGSAGPPGPPGLRGSPGSRGLPGADGRAGVMGPPGSRGASGPAGVRGPNGDAGRPGEPGLMGPRGLPGSPGNIGPAGKEGPVGLPGIDGRPGPIGPAGARGEPGNIGFPGPKGPTGDPGKNGDKGHAGLAGARGAPGPDGNNGAQGPPGPQGVQGGKGEQGPAGPPGFQGLPGPSGPAGEVGKPGERGLHGEFGLPGPAGPRGERGPPGESGAAGPTGPIGSRGPSGPPGPDGNKGEPGVVGAVGTAGPSGPSGLPGERGAAGIPGGKGEKGEPGLRGEIGNPGRDGARGAHGAVGAPGPAGATGDRGEAGAAGPAGPAGPRGSPGERGEVGPAGPNGFAGPAGAAGQPGAKGERGAKGPKGENGVVGPTGPVGAAGPAGPNGPPGPAGSRGDGGPPGMTGFPGAAGRTGPPGPSGISGPPGPPGPAGKEGLRGPRGDQGPVGRTGEVGAVGPPGFAGEKGPSGEAGTAGPPGTPGPQGLLGAPGILGLPGSRGERGLPGVAGAVGEPGPLGIAGPPGARGPPGAVGSPGVNGAPGEAGRDGNPGNDGPPGRDGQPGHKGERGYPGNIGPVGAAGAPGPHGPVGPAGKHGNRGETGPSGPVGPAGAVGPRGPSGPQGIRGDKGEPGEKGPRGLPGLKGHNGLQGLPGIAGHHGDQGAPGSVGPAGPRGPAGPSGPAGKDGRTGHPGTVGPAGIRGPQGHQGPAGPPGPPGPPGPPGVSGGGYDFGYDGDFYRADQPRSAPSLRPKDYEVDATLKSLNNQIETLLTPEGSRKNPARTCRDLRLSHPEWSSGYYWIDPNQGCTMDAIKVYCDFSTGETCIRAQPENIPAKNWYRSSKDKKHVWLGETINAGSQFEYNVEGVTSKEMATQLAFMRLLANYASQNITYHCKNSIAYMDEETGNLKKAVILQGSNDVELVAEGNSRFTYTVLVDGCSKKTNEWGKTIIEYKTNKPSRLPFLDIAPLDIGGADHEFFVDIGPVCFK

SEQ ID NO: 160 - protein, 105 aa, Homo sapiens
MAKISSPTETERCIESLIAVFQKYAGKDGYNYTLSKTEFLSFMNTELAAFTKNQKDPGVLDRMMKKLDTNSDGQLDFSEFLNLIGGLAMACHDSFLKAVPSQKRT

SEQ ID NO: 161 - protein, 283 aa, Homo sapiens
MVNYAWAGRSQRKLWWRSVAVLTCKSVVRPGYRGGLQARRSTLLKTCARARATAPGAMKMVAPWTRFYSNSCCLCCHVRTGTILLGVWYLIINAVVLLILLSALADPDQYNFSSSELGGDFEFMDDANMCIAIAISLLMILICAMATYGAYKQRAAWIIPFFCYQIFDFALNMLVAITVLIYPNSIQEYIRQLPPNFPYRDDVMSVNPTCLVLIILLFISIILTFKGYLISCVWNCYRYINGRNSSDVLVYVTSNDTTVLLPPYDDATVNGAAKEPPPPYVSA

SEQ ID NO: 162 - protein, 712 aa, Homo sapiens
MAGGPGPGEPAAPGAQHFLYEVPPWVMCRFYKVMDALEPADWCQFAALIVRDQTELRLCERSGQRTASVLWPWINRNARVADLVHILTHLQLLRARDIITAWHPPAPLPSPGTTAPRPSSIPAPAEAEAWSPRKLPSSASTFLSPAFPGSQTHSGPELGLVPSPASLWPPPPSPAPSSTKPGPESSVSLLQGARPSPFCWPLCEISRGTHNFSEELKIGEGGFGCVYRAVMRNTVYAVKRLKENADLEWTAVKQSFLTEVEQLSRFRHPNIVDFAGYCAQNGFYCLVYGFLPNGSLEDRLHCQTQACPPLSWPQRLDILLGTARAIQFLHQDSPSLIHGDIKSSNVLLDERLTPKLGDFGLARFSRFAGSSPSQSSMVARTQTVRGTLAYLPEEYIKTGRLAVDTDTFSFGVVVLETLAGQRAVKTHGARTKYLKDLVEEEAEEAGVALRSTQSTLQAGLAADAWAAPIAMQIYKKHLDPRPGPCPPELGLGLGQLACCCLHRRAKRRPPMTQVYERLEKLQAVVAGVPGHLEAASCIPPSPQENSYVSSTGRAHSGAAPWQPLAAPSGASAQAAEQLQRGPNQPVESDESLGGLSAALRSWHLTPSCPLDPAPLREAGCPQGDTAGESSWGSGPGSRPTAVEGLALGSSASSSSEPPQIIINPARQKMVQKLALYEDGALDSLQLLSSSSLPGLGLEQDRQGPEESDEFQS

SEQ ID NO: 163 - protein, 132 aa, Homo sapiens
MNHIVQTFSPVNSGQPPNYEMLKEEQEVAMLGGPHNPAPPTSTVIHIRSETSVPDHVVWSLFNTLFMNTCCLGFIAFAYSVKSRDRKMVGDVTGAQAYASTAKCLNIWALILGIFMTILLVIIPVLVVQAQR

SEQ ID NO: 164 - protein, 207 aa, Homo sapiens
MAPFEPLASGILLLLWLIAPSRACTCVPPHPQTAFCNSDLVIRAKFVGTPEVNQTTLYQRYEIKMTKMYKGFQALGDAADIRFVYTPAMESVCGYFHRSHNRSEEFLIAGKLQDGLLHITTCSFVAPWNSLSLAQRRGFTKTYTVGCEECTVFPCLSIPCKLQSGTHCLWTDQLLQGSEKGFQSRHLACLPREPGLCTWQSLRSQIA

SEQ ID NO: 165 - protein, 282 aa, Homo sapiens
MERPSLRALLLGAAGLLLLLLPLSSSSSSDTCGPCEPASCPPLPPLGCLLGETRDACGCCPMCARGEGEPCGGGGAGRGYCAPGMECVKSRKRRKGKAGAAAGGPGVSGVCVCKSRYPVCGSDGTTYPSGCQLRAASQRAESRGEKAITQVSKGTCEQGPSIVTPPKDIWNVTGAQVYLSCEVIGIPTPVLIWNKVKRGHYGVQRTELLPGDRDNLAIQTRGGPEKHEVTGWVLVSPLSKEDAGEYECHASNSQGQASASAKITVVDALHEIPVKKGEGAEL

SEQ ID NO: 166 - protein, 125 aa, Homo sapiens
MHKEEHEVAVLGAPPSTILPRSTVINIHSETSVPDHVVWSLFNTLFLNWCCLGFIAFAYSVKSRDRKMVGDVTGAQAYASTAKCLNIWALILGILMTIGFILLLVFGSVTVYHIMLQIIQEKRGY

SEQ ID NO: 167 - protein, 1466 aa, Homo sapiens; identical to SEQ ID NO: 44

SEQ ID NO: 168 - protein, 272 aa, Homo sapiens
MVLLTAVLLLLAAYAGPAQSLGSFVHCEPCDEKALSMCPPSPLGCELVKEPGCGCCMTCALAEGQSCGVYTERCAQGLRCLPRQDEEKPLHALLHGRGVCLNEKSYREQVKIERDSREHEEPTTSEMAEETYSPKIFRPKHTRISELKAEAVKKDRRKKLTQSKFVGGAENTAHPRIISAPEMRQESEQGPCRRHMEASLQELKASPRMVPRAVYLPNCDRKGFYKRKQCKPSRGRKRGICWCVDKYGMKLPGMEYVDGDFQCHTFDSSNVE

SEQ ID NO: 169 - protein, 158 aa, Homo sapiens; identical to SEQ ID NO: 35

SEQ ID NO: 170 - protein, 175 aa, Homo sapiens; identical to SEQ ID NO: 36

SEQ ID NO: 171 - protein, 732 aa, Homo sapiens
MPEETQTQDQPMEEEEVETFAFQAEIAQLMSLIINTFYSNKEIFLRELISNSSDALDKIRYESLTDPSKLDSGKELHINLIPNKQDRTLTIVDTGIGMTKADLINNLGTIAKSGTKAFMEALQAGADISMIGQFGVGFYSAYLVAEKVTVITKHNDDEQYAWESSAGGSFTVRTDTGEPMGRGTKVILHLKEDQTEYLEERRIKEIVKKHSQFIGYPITLFVEKERDKEVSDDEAEEKEDKEEEKEKEEKESEDKPEIEDVGSDEEEEKKDGDKKKKKKIKEKYIDQEELNKTKPIWTRNPDDITNEEYGEFYKSLTNDWEDHLAVKHFSVEGQLEFRALLFVPRRAPFDLFENRKKKNNIKLYVRRVFIMDNCEELIPEYLNFIRGVVDSEDLPLNISREMLQQSKILKVIRKNLVKKCLELFTELAEDKENYKKFYEQFSKNIKLGIHEDSQNRKKLSELLRYYTSASGDEMVSLKDYCTRMKENQKHIYYITGETKDQVANSAFVERLRKHGLEVIYMIEPIDEYCVQQLKEFEGKTLVSVTKEGLELPEDEEEKKKQEEKKTKFENLCKIMKDILEKKVEKVVVSNRLVTSPCCIVTSTYGWTANMERIMKAQALRDNSTMGYMAAKKHLEINPDHSIIETLRQKAEADKNDKSVKDLVILLYETALLSSGFSLEDPQTHANRIYRMIKLGLGIDEDDPTADDTSAAVTEEMPPLEGDDDTSRMEEVD

SEQ ID NO: 172 - protein, 1361 aa, Homo sapiens
MGAAGRQDFLFKAMLTISWLTLTCFPGATSTVAAGCPDQSPELQPWNPGHDQDHHVHIGQGKTLLLTSSATVYSIHISEGGKLVIKDHDEPIVLRTRHILIDNGGELHAGSALCPFQGNFTIILYGRADEGIQPDPYYGLKYIGVGKGGALELHGQKKLSWTFLNKTLHPGGMAEGGYFFERSWGHRGVIVHVIDPKSGTVIHSDRFDTYRSKKESERLVQYLNAVPDGRILSVAVNDEGSRNLDDMARKAMTKLGSKHFLHLGFRHPWSFLTVKGNPSSSVEDHIEYHGHRGSAAARVFKLFQTEHGEYFNVSLSSEWVQDVEWTEWFDHDKVSQTKGGEKISDLWKAHPGKICNRPIDIQATTMDGVNLSTEVVYKKGQDYRFACYDRGRACRSYRVRFLCGKPVRPKLTVTIDTNVNSTILNLEDNVQSWKPGDTLVIASTDYSMYQAEEFQVLPCRSCAPNQVKVAGKPMYLHIGEEIDGVDMRAEVGLLSRNIIVMGEMEDKCYPYRNHICNFFDFDTFGGHIKFALGFKAAHLEGTELKHMGQQLVGQYPIHFHLAGDVDERGGYDPPTYIRDLSIHHTFSRCVTVHGSNGLLIKDVVGYNSLGHCFFTEDGPEERNTFDHCLGLLVKSGTLLPSDRDSKMCKMITEDSYPGYIPKPRQDCNAVSTFWMANPNNNLINCAAAGSEETGFWFIFHHVPTGPSVGMYSPGYSEHIPLGKFYNNRAHSNYRAGMIIDNGVKTTEASAKDKRPFLSIISARYSPHQDADPLKPREPAIIRHFIAYKNQDHGAWLRGGDVWLDSCRFADNGIGLTLASGGTFPYDDGSKQEIKNSLFVGESGNVGTEMMDNRIWGPGGLDHSGRTLPIGQNFPIRGIQLYDGPINIQNCTFRKFVALEGRHTSALAFRLNNAWQSCPHNNVTGIAFEDVPITSRVFFGEPGPWFNQLDMDGDKTSVFHDVDGSVSEYPGSYLTKNDNWLVRHPDCINVPDWRGAICSGCYAQMYIQAYKTSNLRMKIIKNDFPSHPLYLEGALTRSTHYQQYQPVVTLQKGYTIHWDQTAPAELAIWLINFNKGDWIRVGLCYPRGTTFSILSDVHNRLLKQTSKTGVFVRTLQMDKVEQSYPGRSHYYWDEDSGLLFLKLKAQNEREKFAFCSMKGCERIKIKALIPKNAGVSDCTATAYPKFTERAVVDVPMPKKLFGSQLKTKDHFLEVKMESSKQHFFHLWNDFAYIEVDGKKYPSSEDGIQVVVIDGNQGRVVSHTSFRNSILQGIPWQLFNYVATIPDNSIVLMASKGRYVSRGPWTRVLEKLGADRGLKLKEQMAFVGFKGSFRPIWVTLDTEDHKAKIFQVVPIPVVKKKKL

SEQ ID NO: 173 - protein, 469 aa, Homo sapiens
MHSFPPLLLLLFWGVVSHSFPATLETQEQDVDLVQKYLEKYYNLKNDGRQVEKRRNSGPVVEKLKQMQEFFGLKVTGKPDAETLKVMKQPRCGVPDVAQFVLTEGNPRWEQTHLTYRIENYTPDLPRADVDHAIEKAFQLWSNVTPLTFTKVSEGQADIMISFVRGDHRDNSPFDGPGGNLAHAFQPGPGIGGDAHFDEDERWTNNFREYNLHRVAAHELGHSLGLSHSTDIGALMYPSYTFSGDVQLAQDDIDGIQAIYGRSQNPVQPIGPQTPKACDSKLTFDAITTIRGEVMFFKDRFYMRTNPFYPEVELNFISVFWPQLPNGLEAAYEFADRDEVRFFKGNKYWAVQGQNVLHGYPKDIYSSFGFPRTVKHIDAALSEENTGKTYFFVANKYWRYDEYKRSMDPGYPKMIAHDFPGIGHKVDAVFMKDGFFYFFHGTRQYKFDPKTKRILTLQKANSWFNCRKN

SEQ ID NO: 174 - protein, 267 aa, Homo sapiens
MRLTVLCAVCLLPGSLALPLPQEAGGMSELQWEQAQDYLKRFYLYDSETKNANSLEAKLKEMQKFFGLPITGMLNSRVIEIMQKPRCGVPDVAEYSLFPNSPKWTSKVVTYRIVSYTRDLPHITVDRLVSKALNMWGKEIPLHFRKVVWGTADIMIGFARGAHGDSYPFDGPGNTLAHAFAPGTGLGGDAHFDEDERWTDGSSLGINFLYAATHELGHSLGMGHSSDPNAVMYPTYGNGDPQNFKLSQDDIKGIQKLYGKRSNSRKK

SEQ ID NO: 175 - protein, 216 aa, Homo sapiens
MRPRSGPTRNPRLRAFAGVPTRGRTRGQSRRCAAEASAGPERDARPGAPAAGTMGAAHSASEEVRELEGKTGFSSDQIEQLHRRFKQLSGDQPTIRKENFNNVPDLELNPIRSKIVRAFFDNRNLRKGPSGLADEINFEDFLTIMSYFRPIDTTMDEEQVELSRKEKLRFLFHMYDSDSDGRITLEEYRNVKWSRSCCRETLTSRRSPLAPSPTGP

SEQ ID NO: 176 - protein, 422 aa, Homo sapiens [sequence omitted]

SEQ ID NO: 177 - protein, 398 aa, Homo sapiens
MMLKGITRLISRIHKLDPGRFLHMGTQARQSIAAHLDNQVPVESPRAISRTNENDPAKHGDQHEGQHYNISPQDLETVFPHGLPPRFVMQVKTFSEACLMVRKPALELLHYLKNTSFAYPAIRYLLYGEKGTGKTLSLCHVIHFCAKQDWLILHIPDAHLWVKNCRDLLQSSYNKQRFDQPLEASTWLKNFKTTNERFLNQIKVQEKYVWNKRESTEKGSPLGEVVEQGITRVRNATDAVGIVLKELKRQSSLGMFHLLVAVDGINALWGRTTLKREDKSPIAPEELALVHNLRKMMKNDWHGGAIVSALSQTGSLFKPRKAYLPQELLGKEGFDALDPFIPILVSNYNPKEFESCIQYYLENNWLQHEKAPTEEGKKELLFLSNANPSLLERHCAYL

SEQ ID NO: 178 - protein, 75 aa, Homo sapiens
MLSHFRVKVKGFILISKYFDPYDLVSSYPKYGPHTSRTGILWELVRNVESLVLRFSKSESAFSSALLAIHMFEKD

SEQ ID NO: 179 - protein, 163 aa, Homo sapiens
MSESGFKLLCQCLGFGSGHFRCDSSRWCHDNGVNYKIGEKWDRQGENGQMMSCTCLGNGKGEFKCDPHEATCYDDGKTYHVGEQWQKEYLGAICSCTCFGGQRGWRCDNCRRPGGEPSPEGTTGQSYNQYSQRYHQRTNTNVNCPIECFMPLDVQADREDSRE

SEQ ID NO: 180 - protein, 483 aa, Homo sapiens
MSIRVTQKSYKVSTSGPRAFSSRSYTSGPGSRISSSSFSRVGSSNFRGGLGGGYGGASGMGGITAVTVNQSLLSPLVLEVDPNIQAVRTQEKEQIKTLNNKFASFIDKVRFLEQQNKMLETKWSLLQQQKTARSNMDNMFESYINNLRRQLETLGQEKLKLEAELGNMQGLVEDFKNKYEDEINKRTEMENEFVLIKKDVDEAYMNKVELESRLEGLTDEINFLRQLYEEEIRELQSQISDTSVVLSMDNSRSLDMDSIIAEVKAQYEDIANRSRAEAESMYQIKYEELQSLAGKHGDDLRRTKTEISEMNRNISRLQAEIEGLKGQRASLEAAIADAEQRGELAIKDANAKLSELEAALQRAKQDMARQLREYQELMNVKLALDIEIATYRKLLEGEESRLESGMQNMSIHTKTTSGYAGGLSSAYGGLTSPGLSYSLGSSFGSGAGSSSFSRTSSSRAVVVKKIETRDGKLVSESSDVLPK

SEQ ID NO: 181 - protein, 430 aa, Homo sapiens
MSFTTRSTFSTNYRSLGSVQAPSYGARPVSSAASVYAGAGGSGSRISVSRSTSFRGGMGSGGLATGIAGGLAGMGGIQNEKETMQSLNDRLASYLDRVRSLETENRRLESKIREHLEKKGPQVRDWSHYFKIIEDLRAQIFANTVDNARIVLQIDNARLAADDFRVKYETELAMRQSVENDIHGLRKVIDDTNITRLQLETEIEALKEELLFMKKNHEEEVKGLQAQIASSGLTVEVDAPKSQDLAKIMADIRAQYDELARKNREELDKYWSQQIEESTTVVTTQSAEVGAAETTLTELRRTVQSLEIDLDSMRNLKASLENSLREVEARYALQMEQLNGILLHLESELAQTRAEGQRQAQEYEALLNIKVKLEAEIATYRRLLEDGEDFNLGDALDSSNSMQTIQKTTTRRIVDGKVVSETNDTKVLRH

SEQ ID NO: 182 - protein, 400 aa, Homo sapiens
MTSYSYRQSSATSSFGGLGGGSVRFGPGVAFRAPSIHGGSGGRGVSVSSARFVSSSSSGAYGGGYGGVLTASDGLLAGNEKLTMQNLNDRLASYLDKVRALEAANGELEVKIRDWYQKQGPGPSRDYSHYYTTIQDLRDKILGATIENSRIVLQIDNARLAADDFRTKFETEQALRMSVEADINGLRRVLDELTLARTDLEMQIEGLKEELAYLKKNHEEEISTLRGQVGGQVSVEVDSAPGTDLAKILSDMRSQYEVMAEQNRKDAEAWFTSRTEELNREVAGHTEQLQMSRSEVTDLRRTLQGLEIELQSQLSMKAALEDTLAETEARFGAQLAHIQALISGIEAQLGDVRADSERQNQEYQRLMDIKSRLEQEIATYRSLLEGQEDHYNNLSASKVL

SEQ ID NO: 183 - protein, 424 aa, Homo sapiens
MDFSRRSFHRSLSSSLQAPVVSTVGMQRLGTTPSVYGGAGGRGIRISNSRHTVNYGSDLTGGGDLFVGNEKMAMQNLNDRLASYLEKVRTLEQSNSKLEVQIKQWYETNAPRAGRDYSAYYRQIEELRSQIKDAQLQNARCVLQIDNAKLAAEDFRLKYETERGIRLTVEADLQGLNKVFDDLTLHKTDLEIQIEELNKDLALLKKEHQEEVDGLHKHLGNTVNVEVDAAPGLNLGVIMNEMRQKYEVMAQKNLQEAKEQFERQTAVLQQQVTVNTEELKGTEVQLTELRRTSQSLEIELQSHLSMKESLEHTLEETKARYSSQLANLQSLLSSLEAQLMQIRSNMERQNNEYHILLDIKTRLEQEIATYRRLLEGEDVKTTEYQLSTLEERDIKKTRKIKTVVQEVVDGKVVSSEVKEVEENI

SEQ ID NO: 184 - protein, 1255 aa, Homo sapiens
MTPGTQSPFFLLLLLTVLTVVTGSGHASSTPGGEKETSATQRSSVPSSTEKNAVSMTSSVLSSHSPGSGSSTTQGQDVTLAPATEPASGSAATWGQDVTSVPVTRPALGSTTPPAHDVTSAPDNKPAPGSTAPPAHGVTSAPDTRPAPGSTAPPAHGVTSAPDTRPAPGSTAPPAHGVTSAPDTRPAPGSTAPPAHGVTSAPDTRPAPGSTAPPAHGVTSAPDTRPAPGSTAPPAHGVTSAPDTRPAPGSTAPPAHGVTSAPDTRPAPGSTAPPAHGVTSAPDTRPAPGSTAPPAHGVTSAPDTRPAPGSTAPPAHGVTSAPDTRPAPGSTAPPAHGVTSAPDTRPAPGSTAPPAHGVTSAPDTRPAPGSTAPPAHGVTSAPDTRPAPGSTAPPAHGVTSAPDTRPAPGSTAPPAHGVTSAPDTRPAPGSTAPPAHGVTSAPDTRPAPGSTAPPAHGVTSAPDTRPAPGSTAPPAHGVTSAPDTRPAPGSTAPPAHGVTSAPDTRPAPGSTAPPAHGVTSAPDTRPAPGSTAPPAHGVTSAPDTRPAPGSTAPPAHGVTSAPDTRPAPGSTAPPAHGVTSAPDTRPAPGSTAPPAHGVTSAPDTRPAPGSTAPPAHGVTSAPDTRPAPGSTAPPAHGVTSAPDTRPAPGSTAPPAHGVTSAPDTRPAPGSTAPPAHGVTSAPDTRPAPGSTAPPAHGVTSAPDTRPAPGSTAPPAHGVTSAPDTRPAPGSTAPPAHGVTSAPDTRPAPGSTAPPAHGVTSAPDTRPAPGSTAPPAHGVTSAPDTRPAPGSTAPPAHGVTSAPDTRPAPGSTAPPAHGVTSAPDTRPAPGSTAPPAHGVTSAPDTRPAPGSTAPPAHGVTSAPDTRPAPGSTAPPAHGVTSAPDTRPAPGSTAPPAHGVTSAPDTRPAPGSTAPPAHGVTSAPDTRPAPGSTAPPAHGVTSAPDNRPALGSTAPPVHNVTSASGSASGSASTLVHNGTSARATTTPASKSTPFSIPSHHSDTPTTLASHSTKTDASSTHHSSVPPLTSSNHSTSPQLSTGVSFFFLSFHISNLQFNSSLEDPSTDYYQELQRDISEMFLQIYKQGGFLGLSNIKFRPGSVVVQLTLAFREGTINVHDVETQFNQYKTEAASRYNLTISDVSVSDVPFPFSAQSGAGVPGWGIALLVLVCVLVALAIVYLIALAVCQCRRKNYGQLDIFPARDTYHPMSEYPTYHTHGRYVPPSSTDRSPYEKVSAGNGGSSLSYTNPAVAAASANL

SEQ ID NO: 185 - protein, 5179 aa, Homo sapiens
MGLPLARLAAVCLALSLAGGSELQTEGRTRYHGRNVCSTWGNFHYKTFDGDVFRFPGLCDYNFASDCRGSYKEFAVHLKRGPGQAEAPAGVESILLTIKDDTIYLTRHLAVLNGAVVSTPHYSPGLLIEKSDAYTKVYSRAGLTLMWNREDALMLELDTKFRNHTCGLCGDYNGLQSYSEFLSDGVLFSPLEFGNMQKINQPDVVCEDPEEEVAPASCSEHRAECERLLTAEAFADCQDLVPLEPYLRACQQDRCRCPGGDTCVCSTVAEFSRQCSHAGGRPGNWRTATLCPKTCPGNLVYLESGSPCMDTCSHLEVSSLCEEHRMDGCFCPEGTVYDDIGDSGCVPVSQCHCRLHGHLYTPGQEITNDCEQCVCNAGRWVCKDLPCPGTCALEGGSHITTFDGKTYTFHGDCYYVLAKGDHNDSYALLGELAPCGSTDKQTCLKTVVLLADKKKNAVVFKSDGSVLLNQLQVNLPHVTASFSVFRPSSYHIMVSMAIGVRLQVQLAPVMQLFVTLDQASQGQVQGLCGNFNGLEGDDFKTASGLVEATGAGFANTWKAQSTCHDKLDWLDDPCSLNIESANYAEHWCSLLKKTETPFGRCHSAVDPAEYYKRCKYDTCNCQNNEDCLCAALSSYARACTAKGVMLWGWREHVCNKDVGSCPNSQVFLYNLTTCQQTCRSLSEADSHCLEGFAPVDGCGCPDHTFLDEKGRCVPLAKCSCYHRGLYLEAGDVVVRQEERCVCRDGRLHCRQIRLIGQSCTAPKIHMDCSNLTALATSKPRALSCQTLAAGYYHTECVSGCVCPDGLMDDGRGGCVVEKECPCVHNNDLYSSGAKIKVDCNTCTCKRGRWVCTQAVCHGTCSIYGSGHYITFDGKYYDFDGHCSYVAVQDYCGQNSSLGSFSIITENVPCGTTGVTCSKAIKIFMGRTELKLEDKHRVVIQRDEGHHVAYTTREVGQYLVVESSTGIIVIWDKRTTVFIKLAPSYKGTVCGLCGNFDHRSNNDFTTRDHMVVSSELDFGNSWKEAPTCPDVSTNPEPCSLNPHRRSWAEKQCSILKSSVFSICHSKVDPKPFYEACVHDSCSCDTGGDCECFCSAVASYAQECTKEGACVFWRTPDLCPIFCDYYNPPHECEWHYEPCGNRSFETCRTINGIHSNISVSYLEGCYPRCPKDRPIYEEDLKKCVTADKCGCYVEDTHYPPGASVPTEETCKSCVCTNSSQVVCRPEEGKILNQTQDGAFCYWEICGPNGTVEKHFNICSITTRPSTLTTFTTITLPTTPTSFTTTTTTTTPTSSTVLSTTPKLCCLWSDWINEDHPSSGSDDGDREPFDGVCGAPEDIECRSVKDPHLSLEQHGQKVQCDVSVGFICKNEDQFGNGPFGLCYDYKIRVNCCWPMDKCITTPSPPTTTPSPPPTTTTTLPPTTTPSPPTTTTTTPPPTTTPSPPITTTTTPLPTTTPSPPISTTTTPPPTTTPSPPTTTPSPPTTTPSPPTTTTTTPPPTTTPSPPMTTPITPPASTTTLPPTTTPSPPTTTTTTPPPTTTPSPPTTTPITPPTSTTTLPPTTTPSPPPTTTTTPPPTTTPSPPTTTTPSPPTITTTTPPPTTTPSPPTTTTTTPPPTTTPSPPTTTPITPPTSTTTLPPTTTPSPPPTTTTTPPPTTTPSPPTTTTPSPPITTTTTPPPTTTPSSPITTTPSPPTTTMTTPSPTTTPSSPITTTTTPSSTTTPSPPPTTMTTPSPTTTPSPPTTTMTTLPPTTTSSPLTTTPLPPSITPPTFSPFSTTTPTTPCVPLCNWTGWLDSGKPNFHKPGGDTELIGDVCGPGWAANISCRATMYPDVPIGQLGQTVVCDVSVGLICKNEDQKPGGVIPMAFCLNYEINVQCCECVTQPTTMTTTTTENPTPPTTTPITTTTTVTPTPTPTGTQTPTTTPITTTTTVTPTPTPTGTQTPTTTPITTTTTVTPTPTPTGTQTPTTTPITTTTTVTPTPTPTGTQTPTTTPITTTTTVTPTPTPTGTQTPTTTPITTTTTVTPTPTPTGTQTPTTTPITTTTTVTPTPTPTGTQTPTTTPITTTTTVTPTPTPTGTQTPTTTPITTTTTVTPTPTPTGTQTPTTTPITTTTTVTPTPTPTGTQTPTTTPITTTTTVTPTPTPTGTQTPTTTPITTTTTVTPTPTPTGTQTPTTTPITTTTTVTPTPTPTGTQTPTTTPITTTTTVTPTPTPTGTQTPTTTPITTTTTVTPTPTPTGTQTPTTTPITTTTTVTPTPTPTGTQTPTTTPITTTTTVTPTPTPTGTQTPTTTPITTTTTVTPTPTPTGTQTPTTTPITTTTTVTPTPTPTGTQTPTTTPITTTTTVTPTPTPTGTQTPTTTPITTTTTVTPTPTPTGTQTPTTTPITTTTTVTPTPTPTGTQTPTTTPITTTTTVTPTPTPTGTQTPTTTPITTTTTVTPTPTPTGTQTPTTTPITTTTTVTPTPTPTGTQTPTTTPITTTTTVTPTPTPTGTQTPTTTPITTTTTVTPTPTPTGTQTPTTTPITTTTTVTPTPTPTGTQTPTTTPITTTTTVTPTPTPTGTQTPTTTPITTTTTVTPTPTPTGTQTPTTTPITTTTTVTPTPTPTGTQTPTTTPITTTTTVTPTPTPTGTQTPTTTPITTTTTVTPTPTPTGTQTPTTTPITTTTTVTPTPTPTGTQTPTTTPITTTTTVTPTPTPTGTQTPTTTPITTTTTVTPTPTPTGTQTPTTTPITTTTTVTPTPTPTGTQTPTTTPITTTTTVTPTPTPTGTQTPTTTPITTTTTVTPTPTPTGTQTPTTTPITTTTTVTPTPTPTGTQTPTTTPITTTTTVTPTPTPTGTQTPTTTPITTTTTVTPTPTPTGTQTPTTTPITTTTTVTPTPTPTGTQTPTTTPITTTTTVTPTPTPTGTQTPTTTPITTTTTVTPTPTPTGTQTPTTTPITTTTTVTPTPTPTGTQTPTTTPITTTTTVTPTPTPTGTQTPTTTPITTTTTVTPTPTPTGTQTPTTTPITTTTTVTPTPTPTGTQTPTTTPITTTTTVTPTPTPTGTQTPTTTPITTTTTVTPTPTPTGTQTPTTTPITTTTTVTPTPTPTGTQTPTTTPITTTTTVTPTPTPTGTQTPTTTPITTTTTVTPTPTPTGTQTPTTTPITTTTTVTPTPTPTGTQTPTTTPITTTTTVTPTPTPTGTQTPTTTPITTTTTVTPTPTPTGTQTPTTTPITTTTTVTPTPTPTGTQTPTTTPITTTTTVTPTPTPTGTQTPTTTPITTTTTVTPTPTPTGTQTPTTTPITTTTTVTPTPTPTGTQTPTTTPITTTTTVTPTPTPTGTQTPTTTPITTTTTVTPTPTPTGTQTPTTTPITTTTTVTPTPTPTGTQTPTTTPITTTTTVTPTPTPTGTQTPTTTPITTTTTVTPTPTPTGTQTPTTTPITTTTTVTPTPTPTGTQTPTTTPITTTTTVTPTPTPTGTQTPTTTPITTTTTVTPTPTPTGTQTPTTTPITTTTTVTPTPTPTGTQTPTTTPITTTTTVTPTPTPTGTQTPTTTPITTTTTVTPTPTPTGTQTPTTTPITTTTTVTPTPTPTGTQTPTTTPITTTTTVTPTPTPTGTQTPTTTPITTTTTVTPTPTPTGTQTPTTTPITTTTTVTPTPTPTGTQTPTTTPITTTTTVTPTPTPTGTQTPTTTPITTTTTVTPTPTPTGTQTPTTTPITTTTTVTPTPTPTGTQTPTTTPITTTTTVTPTPTPTGTQTPTTTPITTTTTVTPTPTPTGTQTPTTTPITTTTTVTPTPTPTGTQTPTTTPITTTTTVTPTPTPTGTQTPTTTPITTTTTVTPTPTPTGTQTPTTTPITTTTTVTPTPTPTGTQTPTTTPITTTTTVTPTPTPTGTQTPTTTPITTTTTVTPTPTPTGTQTPTTTPITTTTTVTPTPTPTGTQTPTTTPITTTTTVTPTPTPTGTQTPTTTPITTTTTVTPTPTPTGTQTPTTTPITTTTTVTPTPTPTGTQTPTTTPITTTTTVTPTPTPTGTQTPTTTPITTTTTVTPTPTPTGTQTPTTTPITTTTTVTPTPTPTGTQTPTTTPITTTTTVTPTPTPTGTQTPTTTPITTTTTVTPTPTPTGTQTPTTTPITTTTTVTPTPTPTGTQTPTTTPITTTTTVTPTPTPTGTQTPTTTPITTTTTVTPTPTPTGTQTPTTTPITTTTTVTPTPTPTGTQTGPPTHTSTAPIAELTTSNPPPESSTPQTSRSTSSPLTESTTLLSTLPPAIEMTSTAPPSTPTAPTTTSGGHTLSPPPSTTTSPPGTPTRGTTTGSSSAPTPSTVQTTTTSAWTPTPTPLSTPSIIRTTGLRPYPSSVLICCVLNDTYYAPGEEVYNGTYGDTCYFVNCSLSCTLEFYNWSCPSTPSPTPTPSKSTPTPSKPSSTPSKPTPGTKPPECPDFDPPRQENETWWLCDCFMATCKYNNTVEIVKVECEPPPMPTCSNGLQPVRVEDPDGCCWHWECDCYCTGWGDPHYVTFDGLYYSYQGNCTYVLVEEISPSVDNFGVYIDNYHCDPNDKVSCPRTLIVRHETQEVLIKTVHMMPMQVQVQVNRQAVALPYKKYGLEVYQSGINYVVDIPELGVLVSYNGLSFSVRLPYHRFGNNTKGQCGTCTNTTSDDCILPSGEIVSNCEAAADQWLVNDPSKPHCPHSSSTTKRPAVTVPGGGKTTPHKDCTPSPLCQLIKDSLFAQCHALVPPQHYYDACVFDSCFMPGSSLECASLQAYAALCAQQNICLDWRNHTHGACLVECPSHREYQACGPAEEPTCKSSSSQQNNTVLVEGCFCPEGTMNYAPGFDVCVKTCGCVGPDNVPREFGEHFEFDCKNCVCLEGGSGIICQPKRCSQKPVTHCVEDGTYLATEVNPADTCCNITVCKCNTSLCKEKPSVCPLGFEVKSKMVPGRCCPFYWCESKGVCVHGNAEYQPGSPVYSSKCQDCVCTDKVDNNTLLNVIACTHVPCNTSCSPGFELMEAPGECCKKCEQTHCIIKRPDNQHVILKPGDFKSDPKNNCTFFSCVKIHNQLISSVSNITCPNFDASICIPGSITFMPNGCCKTCTPRNETRVPCSTVPVTTEVSYAGCTKTVLMNHCSGSCGTFVMYSAKAQALDHSCSCCKEEKTSQREVVLSCPNGGSLTHTYTHIESCQCQDTVCGLPTGTSRRARRSPRHLGSG

SEQ ID NO: 186 - protein, 1217 aa, Homo sapiens
ITITETTSHSTPSYTTSITTTETPSHSTPSYTTSITTTETPSHSTPSFTSSITTTETTSHSTPSFTSSIRTTETTSYSTPSFTSSNTITETTSHSTPSYITSITTTETPSSSTPSFSSSITTTETTSHSTPGFTSSITTTETTSHSTPSFTSSITTTETTSHDTPSFTSSITTSETPSHSTPSSTSLITTTKTTSHSTPSFTSSITTTETTSHSARSFTSSITTTETTSHNTRSFTSSITTTETNSHSTTSFTSSITTTETTSHSTPSFSSSITTTETPLHSTPGLTSWVTTTKTTSHITPGLTSSITTTETTSHSTPGFTSSITTTETTSESTPSLSSSTIYSTVSTSTTAITSHFTTSETAVTPTPVTPSSLSTDIPTTSLRTLTPSSVGTSTSLTTTTDFPSIPTDISTLPTRTHIISSSPSIQSTETSSLVGTTSPTMSTVRMTLRITENTPISSFSTSIVVIPETPTQTPPVLTSATGTQTSPAPTTVTFGSTDSSTSTLHTLTPSTALSTIVSTSQVPIPSTHSSTLQTTPSTPSLQTSLTSTSEFTTESFTRGSTSTNAILTSFSTIIWSSTPTIIMSSSPSSASITPVFSTTIHSVPSSPYIFSTENVGSASITGFPSLSSSATTSTSSTSSSLTTALTEITPFSYISLPSTTPCPGTITITIVPASPTDPCVEMDPSTEATSPPTTPLTVFPFTTEMVTCPTSISIQTTLTTYMDTSSMMPESESSISPNASSSTGTGTVPTNTVFTSTRLPTSETWLSNSSVIPLPLPGVSTIPLTMKPSSSLPTILRTSSKSTHPSPPTTRTSETPVATTQTPTTLTSRRTTRITSQMTTQSTLTTTAGTCDNGGTWEQGQCACLPGFSGDRCQLQTRCQNGGQWDGLKCQCPSTFYGSSCEFAVEQVDLDVVETEVGMEVSVDQQFSPDLNDNTSQAYRDFNKTFWNQMQKIFADMQGFTFKGVEILSLRNGSIVVDYLVLLEMPFSPQLESEYEQVKTTLKEGLQNASQDVNSCQDSQTLCFKPDSIKVNNNSKTELTPAAICRRAAPTGYEEFYFPLVEATRLRCVTKCTSGVDNAIDCHQGQCVLETSGPTCRCYSTDTHWFSGPRCEVAVHWRALVGGLTAGAALLVLLLLALGVRAVRSGWWGGQRRGRSWDQDRKWFETWDEEVVGTFSNWGFEDDGTDKDTNFYVALENVDTTMKVHIKRPEMTSSSV

SEQ ID NO: 187 - protein, 1373 aa, Homo sapiens
MSVGRRKLALLWALALALACTRHTGHAQDGSSESSYKHHPALSPIARGPIGVPLRGATVFPSLRTIPVVRASNPAHNGRVCSTWGSFHYKTFDGDVFRFPGLCNYVFSEHCGAAYEDFNIPATPQPGVSGPHAEQGPHEGGWRGHPADQGLRPGQRPPGPAALQPVWGPHSARAAATPRWKPGWALSSCGTTMTACCWKLDTKYANKNLWALWGLQRDARGQRAPLPQHQADTHGIREPAERWTNPRSSVRTLSLNPRRTAPLALASCEELLHGQLFSGCVALVDVGSYLEACRQDLCFCEDTDLLSCVCHTLAEYSRQCTHAGGLPQDWRGPDFCPQKCPNNMQYHECRSPCADTCSNQEHSRACEDHCVAGCFCPEGTVLDDIGQTGCVPVSKCACVYNGAAYAPGATYSTDCTNCTCSGGRWSCQEVPCPGTCSVLGGAHFSTFDGKQYTVHGDCSYVLTKPCDSSAFTVLAELRRCGLTDSETCLKSVTLSLDGAQTVVVIKASGEVFLNQIYTQLPISAANVTIFRPSTFFIIAQTSLGLQLNLQLVPTMQLFMQLAPKLRGQTCGLCGNFNSIQADDFRTLSGVVEATAAAFFNTFKTQAACPNIRNSFEDPCSLSVENEKYAQHWCSQLTDADGPFGRCHAAVKPGTYYSNCMFDTCNCERSEDCLCAALSSYVHACAAKGVQLGGWRDGVCTKPMTTCPKSMTYHYHVSTCQPTCRSLSEGDITCSVGFIPVDGCICPKGTFLDDTGKCVQASNCPCYHRGSMIPNGESVHDSGAICTCTHGKLSCIGGQAPAPVCAAPMVFFDCRNATPGDTGAGCQKSCHTLDMTCYSPQCVPGCVCPDGLVADGEGGCITAEDCPCVHNEASYRAGQTIRVGCNTCTCDSRMWRCTDDPCLATCAVYGDGHYLTFDGQSYSFNEETASTRWCRTAVAGKTAPRTPFVLSPRTSPAAPQGPPAPRPSRFSWGNFELKLSHGKVEVIGTDESQEVPYTIRQMGIYLVVDTDIGLVLLWDKKTSIFINLSPEFKGRVCGLCGNFDDIAVNDFATRSRSVVGDVLEFGNSWKLSPSCPDALAPKDPCTANPFRKSWAQKQCSILHGPTFAACHAHVEPARYYEACVNDACACDSGGDCECFCTAVARYAQACHEVGTCVCLRTPSICPLFCDYYNPEGQCEWHYQPCGVPCLRTCRNPRGDCLRDVRGLEGCYPKCPPEAPIFDEDKMQCVATCPTPPLPPRCHVHGKSYRPGAVVPSDKNCQSCLCTERGVECTYKAEACVCTYNGQRFHPGDVIYHTTDGTGGCISARCGANGTIERRVYPCSPTTPVPPTTFSFSTPPLVVSSTHTPSNGPSSAHTGPPSSAWPTTAGTSPRT

SEQ ID NO: 188 - protein, 165 aa, Homo sapiens
MEMFQGLLLLLLLSMGGTWASKEPLRPRCRPINATLAVEKEGCPVCITVNTTICAGYCPTMTRVLQGVLPALPQVVCNYRDVRFESIRLPGCPRGVNPVVSYAVALSCQCALCRRSTTDCGGPKDHPLTCDDPRFQDSSSSKAPPPSLPSPSRLPGPSDTPILPQ

SEQ ID NO: 189 - protein, 1210 aa, Homo sapiens
MRPSGTAGAALLALLAALCPASRALEEKKVCQGTSNKLTQLGTFEDHFLSLQRMFNNCEVVLGNLEITYVQRNYDLSFLKTIQEVAGYVLIALNTVERIPLENLQIIRGNMYYENSYALAVLSNYDANKTGLKELPMRNLQEILHGAVRFSNNPALCNVESIQWRDIVSSDFLSNMSMDFQNHLGSCQKCDPSCPNGSCWGAGEENCQKLTKIICAQQCSGRCRGKSPSDCCHNQCAAGCTGPRESDCLVCRKFRDEATCKDTCPPLMLYNPTTYQMDVNPEGKYSFGATCVKKCPRNYVVTDHGSCVRACGADSYEMEEDGVRKCKKCEGPCRKVCNGIGIGEFKDSLSINATNIKHFKNCTSISGDLHILPVAFRGDSFTHTPPLDPQELDILKTVKEITGFLLIQAWPENRTDLHAFENLEIIRGRTKQHGQFSLAVVSLNITSLGLRSLKEISDGDVIISGNKNLCYANTINWKKLFGTSGQKTKIISNRGENSCKATGQVCHALCSPEGCWGPEPRDCVSCRNVSRGRECVDKCKLLEGEPREFVENSECIQCHPECLPQAMNITCTGRGPDNCIQCAHYIDGPHCVKTCPAGVMGENNTLVWKYADAGHVCHLCHPNCTYGCTGPGLEGCPTNGPKIPSIATGMVGALLLLLVVALGIGLFMRRRHIVRKRTLRRLLQERELVEPLTPSGEAPNQALLRILKETEFKKIKVLGSGAFGTVYKGLWIPEGEKVKIPVAIKELREATSPKANKEILDEAYVMASVDNPHVCRLLGICLTSTVQLITQLMPFGCLLDYVREHKDNIGSQYLLNWCVQIAKGMNYLEDRRLVHRDLAARNVLVKTPQHVKITDFGLAKLLGAEEKEYHAEGGKVPIKWMALESILHRIYTHQSDVWSYGVTVWELMTFGSKPYDGIPASEISSILEKGERLPQPPICTIDVYMIMVKCWMIDADSRPKFRELIIEFSKMARDPQRYLVIQGDERMHLPSPTDSNFYRALMDEEDMDDVVDADEYLIPQQGFFSSPSTSRTPLLSSLSATSNNSTVACIDRNGLQSCPIKEDSFLQRYSSDPTGALTEDSIDDTFLPVPEYINQSVPKRPAGSVQNPVYHNQPLNPAPSRDPHYQDPHSTAVGNPEYLNTVQPTCVNSTFDSPAHWAQKGSHQISLDNPDYQQDFFPKEAKPNGIFKGSTAENAEYLRVAPQSSEFIGA

SEQ ID NO: 190 - protein, 1255 aa, Homo sapiens
MELAALCRWGLLLALLPPGAASTQVCTGTDMKLRLPASPETHLDMLRHLYQGCQVVQGNLELTYLPTNASLSFLQDIQEVQGYVLIAHNQVRQVPLQRLRIVRGTQLFEDNYALAVLDNGDPLNNTTPVTGASPGGLRELQLRSLTEILKGGVLIQRNPQLCYQDTILWKDIFHKNNQLALTLIDTNRSRACHPCSPMCKGSRCWGESSEDCQSLTRTVCAGGCARCKGPLPTDCCHEQCAAGCTGPKHSDCLACLHFNHSGICELHCPALVTYNTDTFESMPNPEGRYTFGASCVTACPYNYLSTDVGSCTLVCPLHNQEVTAEDGTQRCEKCSKPCARVCYGLGMEHLREVRAVTSANIQEFAGCKKIFGSLAFLPESFDGDPASNTAPLQPEQLQVFETLEEITGYLYISAWPDSLPDLSVFQNLQVIRGRILHNGAYSLTLQGLGISWLGLRSLRELGSGLALIHHNTHLCFVHTVPWDQLFRNPHQALLHTANRPEDECVGEGLACHQLCARGHCWGPGPTQCVNCSQFLRGQECVEECRVLQGLPREYVNARHCLPCHPECQPQNGSVTCFGPEADQCVACAHYKDPPFCVARCPSGVKPDLSYMPIWKFPDEEGACQPCPINCTHSCVDLDDKGCPAEQRASPLTSIVSAVVGILLVVVLGVVFGILIKRRQQKIRKYTMRRLLQETELVEPLTPSGAMPNQAQMRILKETELRKVKVLGSGAFGTVYKGIWIPDGENVKIPVAIKVLRENTSPKANKEILDEAYVMAGVGSPYVSRLLGICLTSTVQLVTQLMPYGCLLDHVRENRGRLGSQDLLNWCMQIAKGMSYLEDVRLVHRDLAARNVLVKSPNHVKITDFGLARLLDIDETEYHADGGKVPIKWMALESILRRRFTHQSDVWSYGVTVWELMTFGAKPYDGIPAREIPDLLEKGERLPQPPICTIDVYMIMVKCWMIDSECRPRFRELVSEFSRMARDPQRFVVIQNEDLGPASPLDSTFYRSLLEDDDMGDLVDAEEYLVPQQGFFCPDPAPGAGGMVHHRHRSSSTRSGGGDLTLGLEPSEEEAPRSPLAPSEGAGSDVFDGDLGMGAAKGLQSLPTHDPSPLQRYSEDPTVPLPSETDGYVAPLTCSPQPEYVNQPDVRPQPPSPREGPLPAARPAGATLERAKTLSPGKNGVVKDVFAFGGAVENPEYLTPQGGAAPQPHPPPAFSPAFDNLYYWDQDPPERGAPPSTFKGTPTAENPEYLGLDVPV

SEQ ID NO: 191 - protein, 190 aa, Homo sapiens
MTTASTSQVRQNYHQDSEAAINRQINLELYASYVYLSMSYYFDRDDVALKNFAKYFLHQSHEEREHAEKLMKLQNQRGGRIFLQDIKKPDCDDWESGLNAMECALHLEKNVNQSLLELHKLATDKNDPHLCDFIETHYLNEQVKAIKELGDHVTNLRKMGAPESGLAEYLFDKHTWETVIMKAKPRANFP

SEQ ID NO: 192 - protein, 175 aa, Homo sapiens
MSSQIRQNYSTDVEAAVNSLVNLYLQASYTYLSLGFYFDRDDVALEGVSHFFRELAEEKREGYERLLKMQNQRGGRALFQDIKKPAEDEWGKTPDAMKAAMALEKKLNQALLDLHALGSARTDPHLCDFLETHFLDEEVKLIKKMGDHLTNLHRLGGPEAGLGEYLFERLTLKHD

SEQ ID NO: 193 - protein, 535 aa, Homo sapiens
MLGPCMLLLLLLLGLRLQLSLGIILVEEENPDFWNREAAEALGAAKKLQPAQTAAKNLIIFLGDGMGVSTVTAARILKGQKKDKLGPEIPLAMDRFPYVALSKTYNVDKHVPDSGATATAYLCGVKGNFQTIGLSAAARFNQCNTTRGNEVISVMNRAKKAGKSVGVVTTTRVQHASPAGTYAHTVNRNWYSDADVPASARQEGCQDIATQLISNMDIDVILGGGRKYMFRMGTPDPEYPDDYSQGGTRLDGKNLVQEWLAKRQGARYVWNRTELMQASLDPSVAHLMGLFEPGDMKYEIHRDSTLDPSLMEMTEAALRLLSRNPRGFFLFVEGGRIDHGHHESRAYRALTETIMFDDAIERAGQLTSEEDTLSLVTADHSHVFSFGGYPLRGSSIFGLAPGKARDRKAYTVLLYGNGPGYVLKDGARPDVTESESGSPEYRQQSAVPLDEETHAGEDVAVFARGPQAHLVHGVQEQTFIAHVMAFAACLEPYTACDLAPPAGTTDAAHPGRSVVPALLPLLAGTLLLLETATAP

SEQ ID NO: 194 - protein, 461 aa, Homo sapiens
MNNFGNEEFDCHFLDEGFTAKDILDQKINEVSSSDDKDAFYVADLGDILKKHLRWLKALPRVTPFYAVKCNDSKAIVKTLAATGTGFDCASKTEIQLVQSLGVPPERIIYANPCKQVSQIKYAANNGVQMMTFDSEVELMKVARAHPKAKLVLRIATDDSKAVCRLSVKFGATLRTSRLLLERAKELNIDVVGVSFHVGSGCTDPETFVQAISDARCVFDMGAEVGFSMYLLDIGGGFPGSEDVKLKFEEITGVINPALDKYFPSDSGVRIIAEPGRYYVASAFTLAVNIIAKKIVLKEQTGSDDEDESSEQTFMYYVNDGVYGSFNCILYDHAHVKPLLQKRPKPDEKYYSSSIWGPTCDGLDRIVERCDLPEMHVGDWMLFENMGAYTVAAASTFNGFQRPTIYYVMSGPAWQLMQQFQNPDFPPEVEEQDASTLPVSCAWESGMKRHRAACASASINV

SEQ ID NO: 195 - protein, 1148 aa, Homo sapiens
MPLFKNTSVSSLYSGCRLTLLRPEKDGAATRVDAVCTHRPDPKSPGLDRERLYWKLSQLTHGITELGPYTLDRHSLYVNGFTHQSSMTTTRTPDTSTMHLATSRTPASLSGPTTASPLLVLFTINFTITNLRYEENMHHPGSRKFNTTERVLQGLLRPVFKNTSVGPLYSGCRLTLLRPKKDGAATKVDAICTYRPDPKSPGLDREQLYWELSQLTHSITELGPYTLDRDSLYVNGFTQRSSVPTTSIPGTPTVDLGTSGTPVSKPGPSAASPLLVLFTLNFTITNLRYEENMQHPGSRKFNTTERVLQGLLRSLFKSTSVGPLYSGCRLTLLRPEKDGTATGVDAICTHHPDPKSPRLDREQLYWELSQLTHNITELGHYALDNDSLFVNGFTHRSSVSTTSTPGTPTVYLGASKTPASIFGPSAASHLLILFTLNFTITNLRYEENMWPGSRKFNTTERVLQGLLRPLFKNTSVGPLYSGSRLTLLRPEKDGEATGVDAICTHRPDPTGPGLDREQLYLELSQLTHSITELGPYTLDRDSLYVNGFTHRSSVPTTSTGVVSEEPFTLNFTINNLRYMADMGQPGSLKFNITDNVMKHLLSPLFQRSSLGARYTGCRVIALRSVKNGAETRVDLLCTYLQPLSGPGLPIKQVFHELSQQTHGITRLGPYSLDKDSLYLNGYNEPGLDEPPTTPKPATTFLPPLSEATTAMGYHLKTLTLNFTISNLQYSPDMGKGSATFNSTEGVLQHLLRPLFQKSSMGPFYLGCQLISLRPEKDGAATGVDTTCTYHPDPVGPGLDIQQLYWELSQLTHGVTQLGFYVLDRDSLFINGYAPQNLSIRGEYQINFHIVNWNLSNPDPTSSEYITLLRDIQDKVTTLYKGSQLHDTFRFCLVTNLTMDSVLVTVKALFSSNLDPSLVEQVFLDKTLNASFHWLGSTYQLVDIHVTEMESSVYQPTSSSSTQHFYPNFTITNLPYSQDKAQPGTTNYQRNKRNIEDALNQLFRNSSIKSYFSDCQVSTFRSVPNRHHTGVDSLCNFSPLARRVDRVAIYEEFLRMTRNGTQLQNFTLDRSSVLVDGYSPNRNEPLTGNSDLPFWAVIFIGLAGLLGLITCLICGVLVTTRRRKKEGEYNVQQQCPGYYQSHLDLEDLQ

SEQ ID NO: 196 - protein, 526 aa, Homo sapiens
MGHLSAPLHRVRVPWQGLLLTASLLTFWNPPTTAQLTTESMPFNVAEGKEVLLLVHNLPQQLFGYSWYKGERVDGNRQIVGYAIGTQQATPGPANSGRETIYPNASLLIQNVTQNDTGFYTLQVIKSDLVNEEATGQFHVYPELPKPSISSNNSNPVEDKDAVAFTCEPETQDTTYLWWINNQSLPVSPRLQLSNGNRTLTLLSVTRNDTGPYECEIQNPVSANRSDPVTLNVTYGPDTPTISPSDTYYRPGANLSLSCYAASNPPAQYSWLINGTFQQSTQELFIPNITVNNSGSYTCHANNSVTGCNRTTVKTIIVTELSPVVAKPQIKASKTTVTGDKDSVNLTCSTNDTGISIRWFFKNQSLPSSERMKLSQGNTTLSINPVKREDAGTYWCEVFNPISKNQSDPIMLNVNYNALPQENGLSPGAIAGIVIGVVALVALIAVALACFLHFGKTGRASDQRDLTEHKPSVSNHTQDHSNDPPNKMNEVTYSTLNFEAQQPTQPTSASPSLTATEIIYSEVKKQ

SEQ ID NO: 197 - protein, 212 aa, Homo sapiens
MGPPSAPPHRECIPWQGLLLTASLLNFWNPPTTAKLTIESMPLSVAEGKEVLLLVHNLPQHLFGYSWYKGERVDGNSLIVGYVIGTQQATPGAAYSGRETIYTNASLLIQNVTQNDIGFYTLQVIKSDLVNEEATGQFHVYQENAPGLPVGAVAGIVTGVLVGVALVAALVCFLLLAKTGRPWSLPQLCLLDVPSLHCLGPPTQPQDSSFHL

SEQ ID NO: 198 - protein, 244 aa, Homo sapiens
MGPPSAAPRGGHRPWQGLLITASLLTFWDPPTTVQFTIEALPSSAAEGKDVLLLACNISETIQAYYWHKGKTAEGSPLIAGYITDIQANIPGAAYSGREQVYPNGSLLFQNITLEDAGSYTLRTINASYDSDQATGQLHVHQNNVPGLPVGAVAGIVTGVLVGVALVAALVCFLLLSRTGRASIQRDLREQPPPASTPGHGPSHRSTFSAPLPSPRTATPIYVEFLYSDANIYCQIDHKADVVS

SEQ ID NO: 199 - protein, 344 aa, Homo sapiens
MGPPSAPPCRLHVPWKEVLLTASLLTFWNPPTTAKLTIESTPFNVAEGKEVLLLAHNLPQNRIGYSWYKGERVDGNSLIVGYVIGTQQATPGPAYSGRETIYPNASLLIQNVTQNDTGFYTLQVIKSDLVNEEATGQFHVYPELPKPSISSNNSNPVEDKDAVAFTCEPEVQNTTYLWWVNGQSLPVSPRLQLSNGNMTLTLLSVKRNDAGSYECEIQNPASANRSDPVTLNVLYGPDVPTISPSKANYRPGENLNLSCHAASNPPAQYSWFINGTFQQSTQELFIPNITVNNSGSYMCQAHNSATGLNRTTVTMITVSGSAPVLSAVATVGITIGVLARVALI

SEQ ID NO: 200 - protein, 265 aa, Homo sapiens
MGSPSACPYRVCIPWQGLLLTASLLTFWNLPNSAQTNIDVVPFNVAEGKEVLLVVHNESQNLYGYNWYKGERVHANYRIIGYVKNISQENAPGPAHNGRETIYPNGTLLIQNVTHNDAGFYTLHVIKENLVNEEVTRQFYVFSEPPKPSITSNNFNPVENKDIVVLTCQPETQNTTYLWWVNNQSLLVSPRLLLSTDNRTLVLLSATKNDIGPYECEIQNPVGASRSDPVTLNVRYESVQASSPDLSAGTAVSIMIGVLAGMALI

SEQ ID NO: 201 - protein, 349 aa, Homo sapiens
MGPISAPSCRWRIPWQGLLLTASLFTFWNPPTTAQLTIEAVPSNAAEGKEVLLLVHNLPQDPRGYNWYKGETVDANRRIIGYVISNQQITPGPAYSNRETIYPNASLLMRNVTRNDTGSYTLQVIKLNLMSEEVTGQFSVHPETPKPSISSNNSNPVEDKDAVAFTCEPETQNTTYLWWVNGQSLPVSPRLQLSNGNRTLTLLSVTRNDVGPYECEIQNPASANFSDPVTLNVLYGPDAPTISPSDTYYHAGVNLNLSCHAASNPPSQYSWSVNGTFQQYTQKLFIPNITTKNSGSYACHTTNSATGRNRTTVRMITVSDALVQGSSPGLSARATVSIMIGVLARVALI

SEQ ID NO: 202 - protein, 459 aa, Homo sapiens
MAPLCPSPWLPLLIPAPAPGLTVQLLLSLLLLMPVHPQRLPRMQEDSPLGGGSSGEDDPLGEEDLPSEEDSPREEDPPGEEDLPGEEDLPGEEDLPEVKPKSEEEGSLKLEDLPTVEAPGDPQEPQNNAHRDKEGDDQSHWRYGGDPPWPRVSPACAGRFQSPVDIRPQLAAFCPALRPLELLGFQLPPLPELRLRNNGHSVQLTLPPGLEMALGPGREYRALQLHLHWGAAGRPGSEHTVEGHRFPAEIHVVHLSTAFARVDEALGRPGGLAVLAAFLEEGPEENSAYEQLLSRLEEIAEEGSETQVPGLDISALLPSDFSRYFQYEGSLTTPPCAQGVIWTVFNQTVMLSAKQLHTLSDTLWGPGDSRLQLNFRATQPLNGRVIEASFPAGVDSSPRAAEPVQLNSCLAAGDILALVFGLLFAVTSVAFLVQMRRQHRRGTKGGVSYRPAEVAETGA
